(19) United States
(12) Patent Application Publication
(10) Pub. No.: US 2024/0091315 A1
(43) Pub. Date: Mar. 21, 2024

(54) XTEN CONJUGATE COMPOSITIONS AND METHODS OF MAKING SAME

(71) Applicant: AMUNIX PHARMACEUTICALS, INC., South San Francisco, CA (US)

(72) Inventors: Volker Schellenberger, Palo Alto, CA (US); Vladimir Podust, Castro Valley, CA (US); Chia-Wei Wang, Santa Clara, CA (US); Bryant McLaughlin, Millbrae, CA (US); Bee-Cheng Sim, Mountain View, CA (US); Sheng Ding, Foster City, CA (US); Chen Gu, Fremont, CA (US)

(21) Appl. No.: 18/182,954

(22) Filed: Mar. 13, 2023

Related U.S. Application Data
(63) Continuation of application No. 17/084,082, filed on Oct. 29, 2020, now abandoned.
Application No. 17/084,082 is a continuation of application No. 16/133,444, filed on Sep. 17, 2018, now Pat. No. 10,953,073.
Application No. 16/133,444 is a continuation of application No. 14/381,199, filed on Aug. 26, 2014, now Pat. No. 10,172,953.
(60) Provisional application No. 61/709,942, filed on Oct. 4, 2012.
(60) Provisional application No. 61/690,187, filed on Jun. 18, 2012.
(60) Provisional application No. 61/634,312, filed on Feb. 27, 2012.

(51) Int. Cl. A61K 38/24; A61K 47/64; A61K 49/00; C07K 5/02

(52) U.S. Cl. CPC A61K 38/24; A61K 47/64; A61K 49/0032; A61K 49/0052; A61K 49/0056; C07K 5/0205

(57) ABSTRACT

The present invention relates to extended recombinant polypeptide (XTEN) compositions, conjugate compositions comprising XTEN and XTEN linked to cross-linkers useful for conjugation to pharmacologically active payloads, methods of making highly purified XTEN, methods of making XTEN-linker and XTEN-payload conjugates, and methods of using the XTEN-cross-linker and XTEN-payload compositions.

### CROSS-REFERENCE TO RELATED APPLICATION

[0001] This application is a continuation of U.S. patent application Ser. No. 17/084,082, filed Oct. 29, 2020, which is a continuation of U.S. patent application Ser. No. 16/133,444, filed Sep. 17, 2018, now U.S. Pat. No. 10,953,073, which is a continuation of U.S. patent application Ser. No. 14/381,199, filed Aug. 26, 2014, now U.S. Pat. No. 10,172,953, which is a 35 U.S.C. § 371 filing of International Patent Application No. PCT/US2013/028116, filed Feb. 27, 2013, which priority to U.S. Provisional Patent Application Ser. Nos. 61/634,312, filed Feb. 27, 2012, 61/690,187, filed Jun. 18, 2012, and 61/709,942, filed Oct. 4, 2012. Each of the applications referenced in this paragraph are incorporated herein by reference in their entireties.

### SEQUENCE LISTING

[0002] The instant application contains a Sequence Listing which has been submitted electronically in XML format and is hereby incorporated by reference in its entirety. Said XML file, created on Mar. 13, 2023, is named 740764_SA9-718USCON3_ST26.xml, and is 1,932,904 bytes in size.

### BACKGROUND

[0003] Extending the half-life a therapeutic agent, whether being a therapeutic protein, peptide or small molecule, often requires specialized formulations or modifications to the therapeutic agent itself. Conventional modification methods such as pegylation, adding to the therapeutic agent an antibody fragment or an albumin molecule, suffer from a number of profound drawbacks. While these modified forms can be prepared on a large scale, these conventional methods are generally plagued by high cost of goods, complex process of manufacturing, and low purity of the final product. Oftentimes, it is difficult, if not impossible, to purify to homogeneity of the target entity. This is particularly true for pegylation, where the reaction itself cannot be controlled precisely to generate a homogenous population of pegylated agents that carry the same number or mass of polyethylene-glycol. Further, the metabolites of these pegylated agents can have sever side effects. For example, PEGylated proteins have been observed to cause renal tubular vacuolation in animal models (Bendele, A., Seely, J., Richey, C., Sennello, G. & Shopp, G. Short communication: renal tubular vacuolation in animals treated with polyethylene-glycol-conjugated proteins. Toxicol. Sci. 1998. 42, 152-157). Renally cleared PEGylated proteins or their metabolites may accumulate in the kidney, causing formation of PEG hydrates that interfere with normal glomerular filtration. In addition, animals and humans can be induced to make antibodies to PEG (Sroda, K. et al. Repeated injections of PEG-PE liposomes generate anti-PEG antibodies. Cell. Mol. Biol. Lett. 2005.10, 37-47).

[0004] Thus, there remains a considerable need for alternative compositions and methods useful for the production of highly pure form of therapeutic agents with extended half-life properties at a reasonable cost.

### SUMMARY

[0005] The present invention addresses this need and provides related advantages. The compositions and methods disclosed herein not only are useful as therapeutics but are also particularly useful as research tools for preclinical and clinal development of a candidate therapeutic agent. In some aspects, the present invention addresses this need by, in part, generating extended recombinant polypeptide (XTEN) reagents that can be purified to homogeneity with one or a few simple steps, and/or that are amenable to chemical conjugation with payload peptides, proteins and small molecules with reactive groups using a wide diversity of conjugation methods. The use of the XTEN reagents generates high-yield product of XTEN-linked agent that are superior in one or more aspects including high homogeneity, high solubility, long stability, and enhanced terminal half-life compared to unconjugated product.

[0006] The present invention relates, in part, to novel compositions comprising substantially homogeneous extended recombinant polypeptides (XTEN) useful as conjugation partners for linking to one or more payload pharmacologically- or biologically-active agents, resulting in XTEN-payload compositions. In one aspect, the invention provides XTEN engineered for covalent linking to the one or more payloads either directly or via cross-linkers, resulting in XTEN-payload composition that comprise 1, 2, 3, 4, 5, 6, 7, 8, 9, or 10 or more molecules of one, two, three or more types of payloads. It is an object of the present invention to provide such engineered XTEN polypeptides for use in creating conjugates with payload agents of interest as compositions with enhanced pharmaceutical properties, including enhanced pharmacokinetic properties. The invention provides XTEN that are substantially homogeneous in length and sequence that are useful for preparing the conjugates comprising the XTEN linked to one or more payloads such that the resulting XTEN-payload conjugates have a high degree of purity. Such conjugates of high purity are useful in preparing pharmaceutical compositions for subjects having a medical condition for which the one or more payloads have utility in the prevention, treatment or amelioration of the condition.

[0007] In a first aspect, the invention provides substantially homogenous XTEN polypeptide compositions useful as conjugation partners to create XTEN-cross-linker intermediates and XTEN-payload compositions. In some embodiments, the invention provides a substantially homogenous population of polypeptides comprising an extended recombinant polypeptide (XTEN), and wherein at least 90%, 91%, 92%, 93%, 94%, or 95% of individual polypeptide molecules in said population have identical sequence length. In one embodiment of the foregoing, the XTEN is characterized in that: the total XTEN amino acid residues is at least 36 to about 3000 amino acid residues; the sum of glycine (G), alanine (A). serine (S), threonine (T), glutamate (E) and proline (P) residues constitutes more than about 90% of the total amino acid residues of the XTEN; the XTEN sequence is substantially non-repetitive such that (i) the XTEN sequence contains no three contiguous amino acids that are identical unless the amino acids are serine, (ii) at least about 80%, or about 90%, or about 95% of the XTEN sequence consists of non-overlapping sequence motifs, each of the sequence motifs comprising about 9 to about 14 amino acid residues, wherein any two contiguous amino acid residues does not occur more than twice in each of the sequence motifs; or (iii) the XTEN sequence has a subsequence score of less than 10; the XTEN sequence has greater than 90%, 91%, 92%, 93%, 94%, 95%, 96%, 97%, 98%, or greater than 99% random coil formation as determined by GOR algorithm; the XTEN sequence has less than 2%, or 3%, or 4%, or 5% alpha helices; the XTEN sequence has less than 2%, or 3%, or 4%, or 5% beta-sheets as determined by Chou-Fasman algorithm; and the XTEN sequence lacks a predicted T-cell epitope when analyzed by TEPITOPE algorithm, wherein the TEPITOPE algorithm prediction for epitopes within the XTEN sequence is based on a score of −8, or −9, or −10. In another embodiment of the foregoing, the XTEN comprises a sequence having at least about 90%, or at least about 91%, or at least about 92%, or at least about 93%, or at least about 94%, or at least about 95%, or at least about 96%, or at least about 97%, or at least about 98%, or at least about 99%, or 100% sequence identity to a sequence selected from the group consisting of the sequences set forth in Table 2, Table 3, Table 4 and Tables 22-25.

[0008] In other embodiments, the substantially homogenous XTEN polypeptide compositions comprise one or more affinity tags. In one embodiment, the invention provides a substantially homogenous XTEN polypeptide composition comprising a first affinity tag wherein the first affinity tag has binding affinity for a chromatography substrate selected from the group consisting of hydrophobic interaction chromatography (HIC), cation exchange, anion exchange, immobilized metal ion affinity chromatography (IMAC), and immobilized antibody. In one embodiment of the foregoing, the first affinity tag has at least about 90%, 91%, 92%, 93%, 94%, or at least about 95% sequence identity to a sequence selected from the group consisting of the sequences set forth in Table 7. In another embodiment of the foregoing XTEN and affinity tag, the composition further comprises one or more helper sequences. In one embodiment, a helper sequence comprises a sequence having at least about 90%, or at least about 91%, or at least about 92%, or at least about 93%, or at least about 94%, or at least about 95%, or at least about 96%, or at least about 97%, or at least about 98%, or at least about 99%, or 100% sequence identity to a sequence selected from the group consisting of the sequences set forth in Table 10. In another embodiment, the helper sequence is selected from the group consisting of: KNPEQAEEQX1EET wherein X1 is independently S or R (SEQ ID NO: 1); ANPEQAEEQX1EET wherein X1 is independently S or R (SEQ ID NO: 2): KNPEQAEEQAEEQX1 EET wherein X1 is independently S or R (SEQ ID NO: 3); KX2X3EQAEEQAEEQX1EET wherein X1 is independently S or R, X2 is independently K or N, and X3 is independently K, N, T, Q, H, P, E, D, A. R, or S (SEQ ID NO: 4); KX2(X3)₁₀,QX1EET wherein X1 is independently S or R, X2 is independently K or N, and X3 is independently K, N, T, Q, H, P, E, D, A, R, or S (SEQ ID NO: 5); KX2(X3)₇AEEQX1EET wherein X1 is independently S or R, X2 is independently K or N. and X3 is independently K, N, T, Q, H, P, E, D, A, R, or S (SEQ ID NO: 6); KX2X3EQE(X3)₃AEEQREET wherein X2 is independently K or N, and X3 is independently K, N, T, Q, H, P, E, D, A, R, or S (SEQ ID NO: 7); KX2X3EQE(X3)₃AEE(X3)₅ wherein X2 is independently K or N, and X3 is independently K, N, T, Q, H, P, E, D, A, R, or S (SEQ ID NO: 8); KKQEQEKEQAEEQ(X4X5)₂REET wherein X4 is independently A or S and X5 is independently K, Q, or E (SEQ ID NO: 9); KKQEQEKEQAEEQ(X4X5)₄REET wherein X4 is independently A or S and X5 is independently K, Q, or E (SEQ 1D NO: 10); KKQEQEKEQAEEQ(Z)₄REET, wherein Z is any naturally-occurring L-amino acid (SEQ ID NO: 11); KX2(X3)ₙ, wherein n is an integer from 1040 and X2 is independently K or N, and X3 is independently K, N, T, Q, H, P, E, D, A, R, or S (SEQ ID NO: 12); (X3)ₙ wherein n is an integer from 10-50 and X3 is independently K, N, T, Q, H, P, E, D, A, R, or S (SEQ ID NO: 13); KX2QEQEKEQAEEQ(X4X5)ₙX1EET wherein n is zero or an integer from 1-10 and X1 is independently S or R, X2 is independently K or N, X4 is independently A or S, and X5 is independently K, Q, or E (SEQ ID NO: 14); KX2(X3)ₙ(X4X5)ₙX1EET, wherein n is an integer from 5-20, m is zero or an integer from 1-10, X1 is independently S or R, X2 is independently K or N, X3 is independently K, N, T, Q, H, P, E, D, A, R, or S, X4 is independently A or S, and X5 is independently K, Q, or E (SEQ ID NO: 15); and KX2(X3)ₙ(Z)ₙX1EET, wherein n is an integer from 5-20, m is zero or an integer from 1-10, X1 is independently S or R, X2 is independently K or N, X3 is independently K, N, T, Q, H, P, E, D, A, R, or S, and Z is any naturally-occurring L-amino acid (SEQ ID NO: 16), and any sequence homologs showing at least 80%, 90%, 95%, 98%, or 99% sequence identity of the foregoing when optimally aligned.

[0009] In other embodiments of the foregoing substantially homogenous XTEN, affinity tag, and helper sequence compositions, the composition further comprises a first cleavage sequence. Where desired, the cleavage sequence is selected from the group consisting of the sequences set forth in Table 8 and Table 9. In one embodiment of the foregoing, the composition has the configuration of formula I:

(HS)-(AT1)-(CS1)-(XTEN) I

wherein HS is the helper sequence; AT1 is the first affinity tag; CS1 is the first cleavage sequence; and XTEN is the extended recombinant polypeptide. In another embodiment of the foregoing compositions, the composition further comprises a second cleavage sequence. Where desired, the first and the second cleavage sequences are capable of being cleaved by the same protease, and wherein the composition has the configuration of formula II:

(HS)-(CS1)-(XTEN)-(CS2)-(AT1) II

wherein HS is a helper sequence; AT1 is the first affinity tag, CS1 is the first cleavage sequence; CS2 is the second cleavage sequence; and XTEN is the extended recombinant polypeptide. In another embodiment of the foregoing compositions, the first affinity tag comprises the sequence RPRPRPRPRPRPR (SEQ ID NO: 17), HHHHHH (SEQ ID NO: 18), or any affinity tag known in the art or disclosed herein.

[0010] In other embodiments of the substantially homogenous XTEN compositions, the compositions comprise a first and a second affinity tag, a first and a second cleavage sequence, and a helper sequence wherein the second affinity tag is different from the first affinity tag and has binding affinity to a different chromatography substrate than that of the first affinity tag. wherein the chromatography substrate is selected from the group consisting of HIC, cation exchange, anion exchange, IMAC, and immobilized antibody, and wherein the first and the second cleavage sequences are capable of being cleaved by the same protease, and wherein the second affinity tag has at least about 90%, 91%, 920, 93%, 94%, or at least about 95% sequence identity to a sequence selected from the group consisting of the sequences set forth in Table 7. In one embodiment of the foregoing composition, the composition has the configuration of formula III:

(HS)-(AT1)-(CS1)-(XTEN)-(CS2)-(AT2) III

[0011] wherein HS is the helper sequence; AT1 is the first affinity tag; CS1 is the first cleavage sequence; CS2 is the second cleavage sequence: XTEN is the extended recombinant polypeptide; and AT2 is the second affinity tag. In another embodiment of the foregoing composition, the first affinity tag comprises the sequence RPRPRPRPRPRPR (SEQ ID NO: 17) and the second affinity tag comprises the sequence HHHHHH (SEQ ID NO: 18). In another embodiment of the foregoing composition, the first affinity tag comprises the sequence HHHHHH (SEQ ID NO: 18) and the second affinity tag comprises the sequence RPRPRPRPRPRPR (SEQ 1D NO: 17). In another embodiment of the foregoing composition, the first affinity tag comprises the sequence RPRPRPRPRPRPRPRPRPRPRPR (SEQ ID NO: 19) and the second affinity tag comprises the sequence HHHHHHHH (SEQ ID NO: 20).

[0012] In another aspect, the invention provides compositions comprising a substantially homogenous population of a polypeptide obtained by a process. In some embodiments, the compositions are obtained by the process comprising: culturing a host cell that comprises a vector encoding the polypeptide in a fermentation reaction under conditions effective to express the polypeptide by a crude expression product of the host cell, wherein the encoded polypeptide comprises an XTEN, a first cleavage sequence and a first affinity tag; adsorbing the polypeptide of the crude expression product onto a first chromatography substrate under conditions effective to capture the first affinity tag onto the first chromatography substrate; eluting the polypeptide; and recovering the polypeptide. In some embodiments, at least 90%, 91%, 92%, 93%, 94%, or 95% of the polypeptides of the resulting population have identical sequence length. In one embodiment of the foregoing composition, the first chromatography substrate is selected from the group consisting of HIC, cation exchange, anion exchange, and IMAC. In another embodiment of the foregoing composition, the affinity tag is selected from the group consisting of the affinity tags of Table 7. In another embodiment of the foregoing composition the first chromatography substrate is cation exchange and the first affinity tag comprises the sequence RPRPRPRPRPRPR (SEQ ID NO: 17). In another embodiment of the foregoing composition, the first chromatography substrate is IMAC and the first affinity tag comprises the sequence HHHHHHHH (SEQ ID NO: 20). In one embodiment of the foregoing composition, the encoding vector encodes any of the XTEN embodiments described herein comprising at least affinity tag, at least a first cleavage sequence, a helper sequence, and optionally a second cleavage sequence. In another embodiment of the foregoing composition, the vector further encodes a second cleavage sequence and a second affinity tag wherein the first and the second cleavage sequences are capable of being cleaved by the same protease and wherein the second affinity tag has binding affinity to a second, different chromatography substrate than the first affinity tag, and wherein the composition is obtained by the process further comprising: adsorbing the polypeptide onto a second chromatography substrate under conditions effective to capture the second affinity tag onto the second chromatography substrate; eluting the polypeptide; and recovering the polypeptide wherein at least 90%, 91%, 92%, 93%, 94%, or 95% of the polypeptides of the population have identical sequence length. In one embodiment of the foregoing, the first chromatography substrate is different from the second chromatography substrate and each of the first and the second chromatography substrate are independently selected from the group consisting of HIC, cation exchange, anion exchange, and IMAC. In another embodiment of the foregoing composition, the first chromatography substrate is cation exchange and the first affinity tag comprises the sequence RPRPRPRPRPRPR (SEQ ID NO: 17) or RPRPRPRPRPRPRPRPRPRPRPR (SEQ ID NO: 19) and the second chromatography substrate is IMAC and the first affinity tag comprises the sequence HHHHHHHH (SEQ ID NO: 20) or HHHHHHHH (SEQ ID NO: 20). In another embodiment of the foregoing composition, the first chromatography substrate is IMAC and the first affinity tag comprises the sequence HHHHHHHH (SEQ ID NO: 20) or HHHHHHHH (SEQ ID NO: 20) and the second chromatography substrate is cation exchange and the first affinity tag comprises the sequence RPRPRPRPRPRPR (SEQ ID NO: 17) or RPRPRPRPRPRPRPRPRPRPRPR (SEQ ID NO: 19). In another embodiment, the foregoing compositions comprising a first or a first and a second affinity tag are further processed by treating the composition with a protease under conditions effective to cleave the cleavage sequence(s), thereby releasing the XTEN from the affinity tag(s); adsorbing the XTEN onto a chromatography substrate under conditions effective to capture the XTEN but not the affinity tag(s) or the protease; eluting the XTEN; and recovering the XTEN. At least 90%, 91%, 92%, 93%, 94%, or 95% of the individual molecules of XTEN in the resulting composition have identical sequence length. In one embodiment of the foregoing composition, the cleavage sequence(s) are capable of being cleaved by a protease selected from the group consisting of the proteases of Table 9. In another embodiment of the foregoing composition, the cleavage sequence(s) are capable of being cleaved by trypsin and the protease is trypsin. In another embodiment of the foregoing composition, the chromatography substrate is anion exchange. The anion exchange substrate can be a substrate selected from the group consisting of macrocap Q, capto Q, superQ-650M, and poros D. Alternatively, the foregoing compositions comprising one affinity tag or two affinity tags are further processed by treating the composition under conditions effective to cleave the cleavage sequence(s), thereby releasing the XTEN from the one or two affinity tags; adsorbing the protease onto a chromatography substrate under conditions effective to capture the protease and the affinity tags but not the XTEN; and recovering the XTEN from the eluate. In some embodiments, at least 90%, 91%, 92%, 93%, 94%, or 95% of the individual molecules of XTEN of the resulting eluate have identical sequence length. In one embodiment of the foregoing composition, the cleavage sequence(s) are capable of being cleaved by a protease selected from the group consisting of the proteases of Table 9. In another embodiment of the foregoing composition, the cleavage sequence(s) are capable of being cleaved by trypsin and the protease utilized is trypsin. The chromatography substrate can be selected from one or more of cation exchange, HIC or IMAC.

[0013] In another aspect, the invention relates, in part, to polypeptide compositions that can be cleaved into XTEN segments of equal length and sequence. In one embodiment, the invention provides a composition comprising an XTEN sequence, wherein the XTEN sequence further comprises one or more cleavage sequences capable of being cleaved by trypsin and wherein treatment with trypsin under conditions effective to cleave all the cleavage sequences results in a preparation of XTEN fragments wherein each XTEN fragment has at least about 99% sequence identity to every other fragment in the preparation. In one embodiment of the composition, the cleavage sequence has at least 86% sequence identity to or is identical to the sequence SASRSA (SEQ ID NO: 21) or SASKSA (SEQ ID NO: 22). In another embodiment of the composition. the cleavage sequence comprises the sequence RX or KX, wherein X is any L-amino acid other than proline. In one embodiment of the foregoing compositions, the XTEN composition has at least about 90%, 91%, 92%, 93%, 94%, 95%, 96%, 97%, 98%, 99% or 100% sequence identity to the sequences selected from the group of sequences set forth in Table 6.

[0014] In another aspect, the invention relates, in part, to methods for producing XTEN fragments substantially of equal length and sequence. In one embodiment, the invention provides a method of producing a substantially homogenous population of an XTEN, the method comprising treating a population of polypeptides comprising a sequence selected from the group of sequences set forth in Table 6 with trypsin under conditions effective to cleave all of the cleavage sequence(s) resulting in a substantially homogenous XTEN population wherein at least 90%, 91%, 92%, 93%, 94%, or 95% of individual molecules of the XTEN fragments have identical sequence length. In one embodiment of the foregoing method, the method further comprises adsorbing the XTEN fragments onto a chromatography substrate under conditions effective to capture the XTEN fragments but not the protease; eluting the XTEN fragments; and recovering the XTEN fragments wherein at least 90%, 91%, 92%, 93%, 94%, or 95% of individual molecules of the population have identical sequence length. In one embodiment of the foregoing method, the chromatography substrate is anion exchange. The substrate can be selected from the group consisting of macrocap Q, capto Q, superQ-650M, and poros D. In another embodiment of the foregoing method, the XTEN has at least about 90%, 91%, 92%, 93%, 94%, 95%, 96%, 97%, 98%, or 99% sequence identity to a sequence selected from the group of sequences set forth in Table 6. In another embodiment of the foregoing method, the resulting XTEN fragment has at least about 90%, 91%, 92%, 93%, 94%, 95%, 96%, 97%, 98%, or 99% sequence identity to a sequence selected from the group of sequences set forth in Table 2 or 3. In another embodiment, the invention provides XTEN compositions made by the process of the foregoing method embodiments.

[0015] In another aspect, the invention relates, in part, to methods for producing XTEN at high expression yields from a host cell. In some embodiments, the invention provides a method comprising culturing a host cell that comprises a vector encoding a polypeptide comprising the XTEN and a helper sequence in a fermentation reaction under conditions effective to express the polypeptide as a component of a crude expression product at a concentration of more than about 2 grams/liter (g/L), or about 3 g/L, or about 4 g/L, or about 5 g/L, or about 6 g/L, or about 7 g/L of said polypeptide. In one embodiment of the foregoing method, the foregoing expression yields are achieved when the fermentation reaction reaches an optical density of at least 100, or at least 130, or at least 150 at a wavelength of 600 nm. In another embodiment, the invention provides a method for comprising culturing a host cell that comprises a vector encoding a polypeptide comprising the XTEN and a helper sequence in a fermentation reaction under conditions effective to express the polypeptide as a component of a crude expression product at a concentration of more than about 10 milligrams/gram of dry weight host cell (mg/g), or at least about 15 mg/g, or at least about 20 mg/g, or at least about 25 mg/g, or at least about 30 mg/g, or at least about 40 mg/g, or at least about 50 mg/g of said polypeptide. In one embodiment of the foregoing method, the foregoing high-yield expression is achieved when the fermentation reaction reaches an optical density of at least 100, or at least 130, or at least 150 at a wavelength of 600 nm. In another embodiment, the invention provides a method comprising culturing a host cell that comprises a vector encoding a polypeptide comprising the XTEN and a helper sequence in a fermentation reaction under conditions effective to express the polypeptide as a component of a crude expression product at a concentration of more than about 10 milligrams/gram of dry weight host cell (mg/g), or at least about 250 micromoles/L, or about 300 micromoles/L, or about 350 micromoles/L, or about 400 micromoles/L, or about 450 micromoles/L, or about 500 micromoles/L of said polypeptide. In one embodiment of the foregoing method, the foregoing expression yields are achieved when the fermentation reaction reaches an optical density of at least 100, or at least 130, or at least 150 at a wavelength of 600 nm. In one embodiment of the foregoing methods, the helper sequence of the expressed polypeptide is at the N-terminus of the polypeptide, wherein the helper sequence has at least about 90%, 91%, 92%, 93%, 94%, or 95% sequence identity or is identical to a sequence selected from the group consisting of the sequences set forth in Table 10. In another embodiment of the foregoing methods, expression vector further encodes a first affinity tag and a cleavage sequence between the affinity tag and the XTEN, and the method further comprises recovering the crude expression product of the host cell fermentation reaction mixture; adsorbing the polypeptide of the crude expression product onto a first chromatography substrate under conditions effective to capture the first affinity tag of the polypeptide onto the chromatography substrate wherein the first chromatography substrate is selected from the group consisting of HIC, cation exchange, anion exchange, and IMAC; eluting and recovering the polypeptide wherein at least 90%, 91%, 92%, 93%, 94%, or 95% of the polypeptides have identical sequence length. In another embodiment of the foregoing methods, expression vector further encodes a first affinity tag and a second affinity tag different from the first tag and a cleavage sequence between each affinity tag and the XTEN, and the method further comprises recovering the crude expression product of the host cell fermentation reaction mixture; adsorbing the polypeptide onto a first chromatography substrate under conditions effective to capture the first affinity tag of the polypeptide onto the chromatography substrate wherein the first chromatography substrate is selected from the group consisting of HIC. cation exchange, anion exchange, and IMAC; eluting the polypeptide; adsorbing the polypeptide onto a second chromatography substrate under conditions effective to capture the second affinity tag of the polypeptide onto the chromatography substrate wherein the second chromatography substrate is selected from the group consisting of HIC, cation exchange, anion exchange, and IMAC; eluting the polypeptide; and recovering the polypeptide wherein at least 90%, 91%, 92%, 93%, 94%, or 95% of the polypeptides have identical sequence length. In one embodiment of the foregoing methods, the methods further comprise treating the polypeptide with a protease under conditions effective to cleave the cleavage sequence(s), thereby releasing the XTEN from the polypeptide; adsorbing the XTEN onto an anion chromatography substrate under conditions effective to capture the XTEN; eluting the XTEN; and recovering the XTEN wherein at least 90%, or at least 91%, or at least 92%, or at least 93%, or at least 94%, or at least 95% of the individual XTEN molecules have identical sequence length. In the foregoing methods, the anion exchange substrate can be selected from the group consisting of macrocap Q, capto Q, superQ-650M, and poros D. In one embodiment of the foregoing methods, the cleavage sequences are capable of being cleaved by try psin and the protease is try psin. In another embodiment of the foregoing methods, the method further comprises treating the polypeptide with a protease under conditions effective to cleave the cleavage sequence(s), thereby releasing the XTEN from the polypeptide; adsorbing the protease onto a chromatography substrate under conditions effective to capture the protease and the affinity tags but not the XTEN; and recovering the XTEN in the eluate wherein at least 90%, 91%, 92%, 93%, 94%, or 95% of the XTEN have identical sequence length. In one embodiment of the foregoing method, the cleavage sequence is capable of being cleaved by trypsin and the protease utilized is trypsin. In the foregoing method to capture the protease and the affinity tag, the chromatography substrate can be selected from one or more of HIC, cation exchange, and IMAC.

[0016] In another aspect, the invention relates, in part, to a solid support comprising immobilized thereon a population of substantially identical XTEN polypeptide molecules. In one embodiment, the invention provides a solid support comprising immobilized thereon a population of substantially identical polypeptide molecule wherein the solid support comprises a chromatography substrate, immobilized polypeptides each comprising an XTEN, a first affinity tag, and a second affinity tag wherein the first affinity tag is joined to the XTEN by a cleavage sequence at the N-terminus of the XTEN and the second affinity tag is joined to the XTEN by a cleavage sequence at the C-terminus and wherein the second affinity tag is different from the first affinity tag, wherein the chromatography substrate is capable of binding to either said first or said second affinity tag but not both, and wherein at least 90%, 91%, 92%, 93%, 94%, or 95% of the immobilized polypeptide molecules have identical sequence length. In one embodiment of the XTEN comprises a sequence having at least about 90%, or at least about 91%, or at least about 92%, or at least about 93%, or at least about 94%, or at least about 95%, or at least about 96%, or at least about 97%, or at least about 98%, or at least about 99%, or 100% sequence identity to a sequence selected from the group consisting of the sequences set forth in Table 2, Table 3, Table 4 and Tables 22-25, the first and the second affinity tag each independently have at least about 90%, 91%, 92%, 93%, 94%, or at least about 95% sequence identity to a sequence selected from the group consisting of the sequences set forth in Table 7, and the cleavage sequence is selected from the group consisting of the sequences set forth in Table 8 and Table 9. In one embodiment of the foregoing the cleavage sequence has at least about 86% sequence identity to or is identical to the sequence SASRSA (SEQ ID NO: 21) or SASKSA (SEQ ID NO: 22). In one embodiment of the foregoing the cleavage sequence comprises the sequence RX or KX, wherein X is any L-amino acid other than proline. In one embodiment of the foregoing, the solid support is selected from the group consisting of HIC chromatography resin, cation exchange chromatography resin, anion exchange chromatography resin, and IMAC chromatography resin. In one embodiment of the foregoing, the first affinity tag comprises the sequence RPRPRPRPRPRPR (SEQ ID NO: 17) or RPRPRPRPRPRPRPRPRPRPRPR (SEQ ID NO: 19) and the second affinity tag comprises the sequence HHHHHH (SEQ ID NO: 18) or HHHHHHHH (SEQ ID NO: 20). In another embodiment of the foregoing, the first affinity tag comprises the sequence HHHHHH (SEQ ID NO: 18) or HHHHHHHH (SEQ ID NO: 20) and the second affinity tag comprises the sequence RPRPRPRPRPRPR (SEQ ID NO: 17) or RPRPRPRPRPRPRPRPRPRPRPR (SEQ ID NO: 19).

[0017] In another aspect, the invention relates, in part, to compositions of XTEN conjugated to cross-linkers. In some embodiments, the invention provides compositions of any of the XTEN described herein that is covalently linked to one or more molecules of at least a first cross-linker, wherein the cross-linker is selected from the group consisting of the cross-linkers set forth in Table 13, the alkyne reactants set forth in Table 15, and the azide reactants set forth in Table 15. In one embodiment of the conjugate composition, the first cross-linker is conjugated to the at least first XTEN at a location selected from the group consisting of: an alpha-amino group of an N-terminal amino acid residue of the XTEN; an epsilon amino group of each lysine residue of the XTEN; and a thiol group of each cysteine residue of the XTEN. Where desired, the XTEN in this embodiment has at least about 90%, or at least about 96%, or at least about 92%, or at least about 93%, or at least about 94%, or at least about 95%, or at least about 96%, or at least about 97%, or at least about 98%, or at least about 99%, or 100% sequence identity to a sequence selected from the group of sequences set forth in Table 2 and Table 3. In another embodiment of the conjugate composition, the XTEN is selected from the group consisting of AE144, AE288, AE432, AE576, AE864, Seg 174, Seg 175, Seg 176, Seg 177, Seg 186, Seg 187, Seg 188, Seg 189, Seg 190, Seg 191, Seg 192, Seg 193, Seg 194, Seg 195, Seg 196, Seg 197, Seg 198, and Seg 199, and the cross-linker is conjugated to the alpha amino-group of the N-terminal amino acid of the XTEN. In another embodiment of the conjugate composition, the XTEN is selected from the group consisting of Seg 174, Seg 175, Seg 176, Seg 177, Seg 186, Seg 187, Seg 188, Seg 189, Seg 190, Seg 191, Seg 192, Seg 193, Seg 194, Seg 195, Seg 196, Seg 197, Seg 198, and Seg 199 set forth in Table 3, and the cross-linker is conjugated to the thiol group of each cysteine residue of the XTEN. In another embodiment of the conjugate composition, the first cross-linker is selected from the group consisting of N-maleimide, iodoacetyl, pyridyl disulfide and vinyl sulfone, 3-propargyloxypropanoic acid, (oxyethyl),-acetylene where n is 1-10, dibenzylcyclooctyne (DBCO), cyclooctyne (COT), 3-azide-propionic acid, 6-azide-hexanoic acid, and (oxyethyl)ₙ-azide where n is 1-10. In the foregoing embodiments of this paragraph, the conjugate has the configuration of formula IV:

[chemical structure]

wherein independently for each occurrence CL₁ is the cross-linker; x is an integer from 1 to about 100, or 1 to about 50, or 1 to about 40, or 1 to about 20, or 1 to about 10, or 1 to about 5, or is 9, or is 3, or is 2, or is 1. Where desired, the XTEN in this embodiment comprises a sequence having at least about 80%, or at least about 90%, or at least about 91%, or at least about 92%, or at least about 93%, or at least about 94%, or at least about 95%, or at least about 96%, or at least about 97%, or at least about 98%, or at least about 99%, or having 100% sequence identity to a sequence selected from the group of sequences set forth in Tables 2 and 3. In one embodiment of the conjugate of formula IV, CL1 is a cross-linker selected from Table 13. In other embodiments of the XTEN-crosslinker conjugate compositions, the compositions further comprise a single atom residue of a first payload conjugated to each first cross-linker wherein the residue is selected from the group consisting of carbon. nitrogen, oxygen and sulfur. In one embodiment of the foregoing, the first payload of the single atom residue can be selected from the group consisting of the payloads set forth in Tables 11, 12, 18, and 21. In other embodiments of the XTEN-crosslinker conjugate compositions, the compositions further comprise a payload selected from the group consisting of the payloads set forth in Tables 11 and 12 conjugated to each first cross-linker.

[0018] In other embodiments of the XTEN-crosslinker conjugate compositions, the invention provides compositions of an XTEN of the embodiments described herein covalently linked to one or more molecules of a first cross-linker and one or more molecules of a second cross-linker, wherein the first cross-linker is conjugated to either the thiol groups of each cysteine residue of the XTEN or to the epsilon amino groups of the each lysine residue of the XTEN, and the second cross-linker conjugated to alpha amino-group of the N-terminal amino acid of the XTEN wherein each cross-linker is independently selected from the group consisting of the cross-linkers set forth in Table 13, the alkyne reactants of Table 15, and the azide reactants of Table 15. In the foregoing embodiment, the composition has the configuration of formula V:

[chemical structure]

wherein independently for each occurrence; CL1 is the first cross-linker conjugated to cysteine residues of the XTEN; CL2 is the second cross-linker conjugated to XTEN at the N-terminus; x is an integer of 1 to about 10; y is an integer of 1 with the proviso that x+y is ≥2; and XTEN is either a cysteine engineered XTEN comprising x number of cysteine residues or a lysine engineered XTEN comprising x number of lysine residues. In another embodiments of the XTEN-cross-linker conjugate compositions, the compositions further comprise a single atom residue of a first payload conjugated to each of the first cross-linkers wherein the residue is selected from the group consisting of carbon, nitrogen, oxygen and sulfur and a single atom residue of a second payload conjugated to each of the second cross-linkers wherein the residue is selected from the group consisting of carbon, nitrogen, oxygen and sulfur. In one embodiment of the foregoing, the first payload of the single atom residue can be selected from the group consisting of the payloads set forth in Tables 11, 12, 18, and 21 and the second payload of the single atom residue can be independently selected from the group consisting of the payloads set forth in Tables 11, 12, 18, and 21. In some embodiments of the XTEN-cross-linker-payload residue composition, the composition has the configuration of formula VI:

[chemical structure]

wherein independently for each occurrence P_{R1} is a single atom residue of a payload, wherein the residue is selected from the group consisting of carbon, nitrogen, oxygen and sulfur; CL₁ is a cross-linker; x is an integer from 1 to about 100, or 1 to about 50, or 1 to about 40, or 1 to about 20, or 1 to about 10, or 1 to about 5, or is 3, or is 2, or is 1. Where desired, the XTEN in this embodiment comprises a sequence having at least about 80%, or at least about 90%, or at least about 91%, or at least about 92%, or at least about 93%, or at least about 94%, or at least about 95%, or at least about 96%, or at least about 97%, or at least about 98%, or at least about 99%, or having 100% sequence identity to a sequence selected from the group of sequences set forth in Tables 2 and 3. In one embodiment of the conjugate of formula VI, the single atom residue of a payload is from a payload selected from the group consisting of the payloads set forth in Tables 11, 12, 18, 19, and 21. In one embodiment of the conjugate of formula VI, CL₁ is a cross-linker selected from Table 13. In one embodiment of the conjugate of formula VI, each cross-linker is linked to a cysteine sulfur of the XTEN. In another embodiment of the conjugate of formula VI, each cross-linker is linked to a lysine epsilon amino group of the XTEN. In another embodiment of the conjugate of formula VI, x is 1 and the cross-linker is linked to the N-terminal amino group of the XTEN. In another embodiment of the conjugate of formula VI, CL₁ is the reaction product of a first and a second click chemistry reactant selected from Table 15. In another embodiment, the invention provides a preparation of the conjugate of formula VI in which at least about 80%, or at least about 90%, or at least about 91%, or at least about 92%, or at least about 93%, or at least about 94%, or at least about 95% of the XTEN molecules of the preparation of the conjugate have identical sequence length. In other embodiments of the XTEN-crosslinker conjugate compositions, the compositions further comprise a first payload conjugated to each of the first cross-linkers wherein the payload is selected from the group consisting of the payloads set forth in Tables 11, 12, 18, and 21, and a second payload different from the first payload conjugated to the second cross-linker wherein the second payload is selected from the group consisting of payloads set forth in Tables 11, 12, 18, and 21. In one embodiment of the XTEN-crosslinker-payload conjugate composition, the composition comprises a first payload conjugated to each of the first cross-linkers wherein the payload is selected from the group consisting drug moieties of Table 21, and a second payload different from the first payload conjugated to the second cross-linker wherein the second payload is selected from the group consisting of targeting moieties of Table 21. In one embodiment of the XTEN-crosslinker-payload conjugate composition with a first and a second payload, a single second payload is linked to the N-terminus of the XTEN by the second cross-linker conjugated by reaction of an alkyne reactant and an azide reactant selected from the group consisting of the reactants of Table 15. In some embodiments of the XTEN-cross-linker-payload composition, the composition has the configuration of formula VII:

[chemical structure]

wherein independently for each occurrence: P₁ is a payload selected from the group consisting of the payloads set forth in Tables 11, 12, 18, 19, and 21; CL₁ is a cross-linker; x is an integer from 1 to about 100, or 1 to about 50, or 1 to about 40, or 1 to about 20, or 1 to about 10, or 1 to about 5, or is 9, or is 3, or is 2, or is 1; and XTEN is a sequence having at least about 80%, or at least about 90%, or at least about 91%, or at least about 92%, or at least about 93%, or at least about 94%, or at least about 95%, or at least about 96%, or at least about 97%, or at least about 98%, or at least about 99%, or having 100% sequence identity to a sequence selected from the group of sequences set forth in Tables 2 and 3. In one embodiment of the conjugate of formula VII, CL₁ is a cross-linker selected from Table 13. In one embodiment of the conjugate of formula VII, each cross-linker is linked to a cysteine sulfur of the XTEN. In another embodiment of the conjugate of formula VII, each cross-linker is linked to an lysine epsilon amino group of the XTEN. In another embodiment of the conjugate of formula VII, x is 1 and the cross-linker is linked to the N-terminal amino group of the XTEN. In one embodiment, the conjugate of formula VII is selected from the group consisting of the conjugates set forth in Table 21. In another embodiment of the conjugate of formula VII, CL₁ is the reaction product of a first and a second click chemistry reactant selected from Table 15. It will be understood by one of skill in the art that the compositions of the foregoing embodiments comprising the payload conjugated to an XTEN-cross-linker using the specified components represents the reaction product of the reactants and thus differs from the precise composition of the reactants. In another embodiment, the invention provides a preparation of the conjugate of formula VII in which at least about 80%, or at least about 90%, or at least about 91%, or at least about 92%, or at least about 93%, or at least about 94%, or at least about 95% of the XTEN molecules of the preparation of the conjugate have identical sequence length.

[0019] In another aspect, the invention relates, in part, to compositions of a first and a second XTEN conjugated to each other. In some embodiments, the conjugate composition comprises a first and a second XTEN. wherein the XTEN are the same or they are different and each independently has at least about 90%, or at least about 91%, or at least about 92%, or at least about 93%, or at least about 94%, or at least about 95%, or at least about 96%, or at least about 97%, or at least about 98%, or at least about 99%, or 100% sequence identity to a sequence selected from the group of sequences set forth in Table 3, and in which the first and the second XTEN are conjugated to each other by the N-termini of the first and the second XTEN with a cross-linker created by reaction of an alkyne reactant and an azide reactant selected from the group consisting of the reactants of Table 15, resulting in a dimeric XTEN conjugate. In one embodiment of the dimeric XTEN composition. at least 90%, 91%, 92%, 93%, 94%, or 95% of the individual molecules of each of the first XTEN have identical sequence length and at least 90%, 91%, 92%, 93%, 94%, or 95% of the individual molecules of each of the second XTEN have identical sequence length. In one embodiment of the dimeric XTEN conjugate, the first XTEN has at least about 90%, or at least about 91%, or at least about 92%, or at least about 93%, or at least about 94%, or at least about 95%, or at least about 96%, or at least about 97%, or at least about 98%, or at least about 99%, or 100% sequence identity to a sequence selected from the group of sequences consisting of Seg 174, Seg 175, Seg 176, Seg 177, Seg 186, Seg 187, Seg 188, Seg 189, Seg 190, Seg 191, Seg 192, Seg 193, Seg 194, Seg 195, Seg 196, Seg 197, Seg 198, and Seg 199 set forth in Table 3 and the second XTEN has at least about 90%, or at least about 91%, or at least about 92%, or at least about 93%, or at least about 94%, or at least about 95%, or at least about 96%, or at least about 97%, or at least about 98%, or at least about 99%, or 100% sequence identity to a different sequence selected from the group of sequences consisting of Seg 174, Seg 175, Seg 176, Seg 177, Seg 186, Seg 187, Seg 188, Seg 189, Seg 190, Seg 191, Seg 192, Seg 193, Seg 194, Seg 195, Seg 196, Seg 197, Seg 198, and Seg 199 set forth in Table 3. In another embodiment of the dimeric XTEN conjugate, the first XTEN and the second XTEN are the same and each has at least about 90%, or at least about 91%, or at least about 92%, or at least about 93%, or at least about 94%, or at least about 95%, or at least about 96%, or at least about 97%, or at least about 98%, or at least about 99%, or 100% sequence identity to a sequence selected from the group of sequences set forth in Table 3. In another embodiment of the dimeric XTEN conjugate, the first XTEN and the second XTEN are the same are each has at least about 90%, or at least about 91%, or at least about 92%, or at least about 93%, or at least about 94%, or at least about 95%, or at least about 96%, or at least about 97%, or at least about 98%, or at least about 99%, or 100% sequence identity to a sequence selected from the group of sequences consisting of Seg 174, Seg 175, Seg 176, Seg 177, Seg 186, Seg 187, Seg 188, Seg 189, Seg 190, Seg 191, Seg 192, Seg 193, Seg 194, Seg 195, Seg 196, Seg 197, Seg 198, and Seg 199 set forth in Table 3. In another embodiment of the dimeric XTEN conjugate, the first and the second XTEN each comprises one or more cysteine residues, and further comprises a first cross-linker conjugated to each cysteine residue of the first XTEN and a second cross-linker conjugated to each cysteine residue of the second XTEN, wherein the first and the second cross-linkers are independently selected from the group consisting of the cross-linkers set forth in Table 13. In another embodiment of the dimeric XTEN conjugate, the first and the second XTEN each comprises one or more lysine residues, and further comprises a cross-linker conjugated to each lysine residue of the first and the second XTEN of the conjugate, wherein the cross-linker is selected from the group consisting of the cross-linkers set forth in Table 13. In another embodiment of the dimeric XTEN conjugated to cross-linkers, the conjugate further comprises a single atom residue of a first payload conjugated to each cross-linker of the first XTEN wherein the residue is selected from the group consisting of carbon, nitrogen, oxygen and sulfur, and further comprises a single atom residue of a second payload conjugated to each cross-linker of the second XTEN wherein the residue is selected from the group consisting of carbon, nitrogen, oxygen and sulfur. In the foregoing embodiment, the first payload of the single atom residue can be selected from the group consisting of the payloads set forth in Tables 11, 12, 18, and 21, and the second payload of the single atom residue is a different payload from the first payload and can be selected from the group consisting of the payloads set forth in Tables 11, 12, 18, and 21. In some embodiments of the dimeric XTEN-cross-linker-payload residue composition, the composition has the configuration of formula X

[chemical structure]

wherein independently for each occurrence P_{R1} is a single atom residue of a first payload wherein the residue is selected from the group consisting of carbon, nitrogen, oxygen and sulfur; P_{R2} is a single atom residue of a second payload wherein the residue is selected from the group consisting of carbon, nitrogen, oxygen and sulfur; CL₁ is a cross-linker; x is an integer from 1 to about 100, or 1 to about 50, or 1 to about 40, or 1 to about 20, or 1 to about 10, or 1 to about 5, or is 9, or is 3, or is 2, or is 1; CL₂ is a cross-linker that is different from CL₁; y is an integer from 1 to about 100, or 1 to about 50, or 1 to about 40, or 1 to about 20, or 1 to about 10, or 1 to about 5, or is 9, or is 3, or is 2, or is 1, with the proviso that x+y is ≥2; 2×CL is alternatively a divalent cross-linker or the reaction product of a first and a second click chemistry reactant selected from Table 15; XTEN₁ is a polypeptide having at least 80%, or at least about 90%, or at least about 91%, or at least about 92%, or at least about 93%, or at least about 94%, or at least about 95%, or at least about 96%, or at least about 97%, or at least about 98%, or at least about 99%, or having 100% sequence identity to a sequence selected from the group of sequences set forth in Tables 2 and 3; and XTEN₂ is a polypeptide having at least 80%, or at least about 90%, or at least about 91%, or at least about 92%, or at least about 93%, or at least about 94%, or at least about 95%, or at least about 96%, or at least about 97%, or at least about 98%, or at least about 99%, or having 100% sequence identity to a sequence selected from the group of sequences set forth in Tables 2 and 3. In one embodiment of the conjugate of formula X, CL₁ and CL₂ are each selected from the group of cross-linkers set forth in Table 13. In another embodiment of the conjugate of formula X, x is 1 and CL₁ is linked to the N-terminal amino group of the XTEN. In another embodiment of the conjugate of formula X, CL₁ is the reaction product of a first and a second click chemistry reactant selected from Table 15. In another embodiment of the conjugate of formula X, C₂ is the reaction product of a first azide and a second alkyne click chemistry reactant selected from Table 15. In another embodiment of the conjugate of formula X, each CL₁ is linked to a cysteine sulfur of the XTEN, and each CL₂ is linked to a cysteine sulfur of XTEN₂. In another embodiment of the conjugate of formula X, each CL₁ is linked to a lysine epsilon amino group of the XTEN, and each CL₂ is linked to a lysine epsilon amino group of the XTEN₂. In another embodiment of the conjugate of formula X, each CL₁ is linked to a cysteine sulfur of the XTEN, and each CL₂ is linked to a lysine epsilon amino group of the XTEN₂. In another embodiment of the conjugate of formula X, XTEN₁ and XTEN₂ are identical. In another embodiment of the conjugate of formula X, XTEN₁ and XTEN₂ are different. In another embodiment, the invention provides a preparation of the conjugate of formula X in which at least about 80%, or at least about 90%, or at least about 91%, or at least about 92%, or at least about 93%, or at least about 94%, or at least about 95% of the XTEN molecules of the preparation of the conjugate have identical sequence length. In another embodiment of the dimeric XTEN conjugated to cross-linkers, the composition further comprises a first payload conjugated to each cross-linker of the first XTEN wherein the first payload is selected from the group consisting of the payloads set forth in Tables 11, 12, 18, and 21, and further comprises a second payload different from the first payload wherein the second payload is conjugated to each cross-linker of the second XEN wherein the second payload is selected from the group consisting of the payloads set forth in Tables 11, 12, 18, and 21. In another embodiment of the dimeric XTEN conjugated to cross-linkers, the composition further comprises a first payload conjugated to each cross-linker of the first XTEN wherein the first payload is selected from the group consisting of the targeting moieties set forth in Table 18 or Table 21, and further comprises a second payload different from the first payload wherein the second payload is conjugated to each cross-linker of the second XTEN wherein the second payload is selected from the group of toxins set forth in Table 18 or Table 21. In another embodiment of the dimeric XTEN conjugated to cross-linkers and a first and a second payload, the first XTEN is Seg 176 set forth in Table 3 and the second XTEN is selected from the group consisting of Seg 176 and Seg 177 set forth in Table 3. In some embodiments of the dimeric XTEN-cross-linker-payload composition, the composition has the configuration of formula XI

[chemical structure]

wherein independently for each occurrence P₁ is a first payload selected from the group of payloads set forth in Tables 11, 12, 18, 19, and 21; P₂ is a second payload selected from the group of payloads set forth in Tables 11, 12, 18, 19, and 21 and that is different from P₁; CL₁ is a cross-linker; x is an integer from 1 to about 100, or 1 to about 50, or 1 to about 40, or 1 to about 20, or 1 to about 10, or 1 to about 5, or is 9, or is 3, or is 2, or is 1; CL₂ is a cross-linker that is different from CL₁; y is an integer from 1 to about 100, or 1 to about 50, or 1 to about 40, or 1 to about 20, or 1 to about 10, or 1 to about 5, or is 9, or is 3, or is 2, or is 1, with the proviso that x+y is ≥2; 2×CL is alternatively a divalent cross-linker or the reaction product of a first and a second click chemistry reactant selected from Table 15; XTEN₁ is a first substantially homogeneous XTEN having at least 80%, or at least about 90%, or at least about 91%, or at least about 92%, or at least about 93%, or at least about 94%, or at least about 95%, or at least about 96%, or at least about 97%, or at least about 98%, or at least about 99%, or having 100% sequence identity to a sequence selected from the group of sequences set forth in Tables 2 and 3; and XTEN₂ is a first substantially homogeneous having at least 80%, or at least about 90%, or at least about 91%, or at least about 92%, or at least about 93%, or at least about 94%, or at least about 95%, or at least about 96%, or at least about 97%, or at least about 98%, or at least about 99%, or having 100% sequence identity to a sequence selected from the group of sequences set forth in Tables 2 and 3. In one embodiment of the conjugate of formula XI, CL₁ and CL₂ are each selected from the group of cross-linkers set forth in Table 13. In another embodiment of the conjugate of formula XI, x is 1 and CL₁ is linked to the N-terminal amino group of the XTEN. In another embodiment of the conjugate of formula XI, CL₁ is the reaction product of a first and a second click chemistry reactant selected from Table 15. In another embodiment of the conjugate of formula XI, C₂ is the reaction product of a first and a second click chemistry reactant selected from Table 15. In another embodiment of the conjugate of formula XI, each CL₁ is linked to a cysteine sulfur of the XTEN₁ and each CL₂ is linked to a cysteine sulfur of XTEN₂. In another embodiment of the conjugate of formula XI, each CL₁ is linked to a lysine epsilon amino group of the XTEN₁ and each CL₂ is linked to a lysine epsilon amino group of the XTEN₂. In another embodiment of the conjugate of formula XI, each CL₁ is linked to a cysteine sulfur of the XTEN₁ and each CL₂ is linked to a lysine epsilon amino group of the XTEN₂. In another embodiment of the conjugate of formula XI, XTEN₁ and XTEN₂ are identical. In another embodiment of the conjugate of formula XI, XTEN₁ and XTEN₂ are different. In one embodiment, the conjugate of formula XI is selected from the group consisting of the conjugates set forth in Table 21. In another embodiment, the invention provides a preparation of the conjugate of formula XI in which at least about 80%, or at least about 90%, or at least about 91%, or at least about 92%, or at least about 93%, or at least about 94%, or at least about 95% of the respective XTEN₁ and XTEN₂ molecules of the preparation of the conjugate have identical sequence length.

[0020] In another aspect, the invention relates, in part, to compositions of a first and a second and a third XTEN conjugated to each other, resulting in trimeric conjugate compositions. In some embodiments, the conjugate compositions comprise a first and a second and a third XTEN wherein the XTEN may be the same or they may be different, and in which the first and the second and the third XTEN are conjugated to each other by the N-terminus using a trivalent cross-linker selected from the group consisting of the trivalent cross-linkers set for in Table 13 or Table 14. In one embodiment of the trimeric conjugate, the first and the second and the third XTEN are identical or are different and each has at least about 90%, or at least about 91%, or at least about 92%, or at least about 93%, or at least about 94%, or at least about 95%, or at least about 96%, or at least about 97%, or at least about 98%, or at least about 99%, or 100% sequence identity to a sequence selected from the group of sequences set forth in either Table 2 or Table 3. In another embodiment of the trimeric conjugate, the first and the second and the third XTEN are identical or are different and at least 90%, 91%, 92%, 93%, 94%, or 95% of the individual molecules of each of the first XTEN have identical sequence length and at least 90%, 91%, 92%, 93%, 94%, or 95% of the individual molecules of each of the second XTEN have identical sequence length and at least 90%, 91%, 92%, 93%, 94%, or 95% of the individual molecules of each of the third XTEN have identical sequence length. In another embodiment of the trimeric conjugate the trivalent cross-linker is selected from the group consisting of Tris-(2-Maleimidoethyl)amine (TMEA) and amine-reactive Tris-(succimimidyl aminotricetate) (TSAT). In another embodiment of the trimeric conjugate, the first and the second and the third XTEN are identical and each has at least about 90%, or at least about 91%, or at least about 92%, or at least about 93%, or at least about 94%, or at least about 95%, or at least about 96%, or at least about 97%, or at least about 98%, or at least about 99%, or 100% sequence identity to a sequence selected from the group consisting of Seg 174, Seg 175, Seg 176, Seg 177, Seg 186, Seg 187, Seg 188, Seg 189, Seg 190, Seg 191, Seg 192, Seg 193, Seg 194, Seg 195, Seg 196, Seg 197, Seg 198, and Seg 199 set forth in Table 3. In another embodiment of the trimeric conjugate, the first and the second and the third XTEN are identical and each has at least about 90%, or at least about 91%, or at least about 92%, or at least about 93%, or at least about 94%, or at least about 95%, or at least about 96%, or at least about 97%, or at least about 98%, or at least about 99%, or 100% sequence identity to a sequence selected from the group consisting of Seg 174, Seg 175, Seg 176, Seg 177, Seg 186, Seg 187, Seg 188, Seg 189, Seg 190, Seg 191, Seg 192, Seg 193, Seg 194, Seg 195, Seg 196, Seg 197, Seg 198, and Seg 199 set forth in Table 3, and the third XTEN is different from the first and the second XTEN and has at least about 90%, or at least about 91%, or at least about 92%, or at least about 93%, or at least about 94%, or at least about 95%. or at least about 96%, or at least about 97%, or at least about 98%, or at least about 99%4, or 100% sequence identity to a sequence selected from the group consisting of Seg 174, Seg 175, Seg 176, Seg 177, Seg 186, Seg 187, Seg 188, Seg 189, Seg 190, Seg 191, Seg 192, Seg 193, Seg 194, Seg 195, Seg 196, Seg 197, Seg 198, and Seg 199 set forth in Table 3. In another embodiment of the trimeric conjugate, each XTEN comprises at least a first cysteine residue and the conjugate further comprises a first cross-linker conjugated to each cysteine residue of the first XTEN, a second cross-linker conjugated to each cysteine residue of the second XTEN, and a third cross-linker conjugated to each cysteine residue of the third XTEN, wherein the cross-linker is selected from the group consisting of the cross-linkers set forth in Table 13. In some embodiments of the trimeric conjugate, the composition has the configuration of formula XII:

[chemical structure]

wherein independently for each occurrence; 3×CL is the trivalent cross-linker, CL1 is the first cross-linker conjugated to XTEN₁; CL2 is the second cross-linker conjugated to XTEN₂; CL3 is the third cross-linker conjugated to XTEN₃; x is an integer of 1 to about 10; y is an integer of 1 to about 10; z is an integer of 1 to about 10 with the proviso that x+y+z is ≥3; XTEN₁ is the first XTEN; XTEN₂ is the second XTEN; and XTEN₃ is the third XTEN. In another embodiment of the trimeric conjugate, the conjugate further comprises a single atom residue of a first payload conjugated to each first cross-linker of the first XTEN wherein the residue is selected from the group consisting of carbon, nitrogen, oxygen and sulfur; a single atom residue of a second payload conjugated to each second cross-linker of the second XTEN wherein the residue is selected from the group consisting of carbon, nitrogen, oxygen and sulfur; and a single atom residue of a third payload conjugated to each third cross-linker of the third XTEN wherein the residue is selected from the group consisting of carbon, nitrogen, oxy gen and sulfur. In another embodiment of the trimeric conjugate composition, the composition further comprises a first payload conjugated to each first cross-linker of the first XTEN selected from the group consisting of the payloads set forth in Tables 11, 12, 18 and 21; a second payload conjugated to each second cross-linker of the second XTEN selected from the group consisting of the payloads set forth in Tables 11, 12, 18 and 21, wherein the payload is the same or is different from the first payload; and a third payload conjugated to each third cross-linker of the third XTEN selected from the group consisting of the payloads set forth in Tables 11, 12, 18 and 21, wherein the payload is the same or is different from the first or the second payload. In one embodiment of the trimeric XTEN-payload conjugate composition, the first payload is a targeting moiety with specific binding affinity to a target, wherein the targeting moiety is selected from the group consisting of the targeting moieties set forth in Tables 17-19 and 21, and the second and the third payloads are a drug, which may be the same or may be different and wherein the drug is selected from the group consisting of the drugs set forth in Table 11, Table 18, and Table 21. In one embodiment of the trimeric XTEN-payload conjugate composition wherein the first payload is a targeting moiety with specific binding affinity to a target and the second payload and the third payload is a drug, the targeting moiety is selected from the group consisting of LHRH and folate and the drug is selected from the group consisting of doxorubicin, paclitaxel, auristatin, monomethyl auristatin E (MMAE), monomethyl auristatin F, maytansine, dolastatin, calicheamicin, vinca alkaloid, camptothecin, mitomycin C, epothilone, hTNF, Il-12, bortezomib, ranpirnase, pseudomonas exotoxin, SN-38, and rachelmycin. In one embodiment of the trimeric XTEN-payload conjugate composition wherein the first payload is a targeting moiety with specific binding affinity to a target and the second payload and the third payload is a drug, the targeting moiety, and the drug moiety correspond to any one of conjugates 1-290 set forth in Table 21. In another embodiment of the trimeric XTEN-payload conjugate composition wherein the first payload is a targeting moiety with specific binding affinity to a target and the second payload and the third payload is a drug, the conjugate has the XTEN, the targeting moiety, and the drug moiety corresponding to conjugate 71 of Table 21. In another embodiment of the trimeric XTEN-payload conjugate composition, the composition has the configuration of formula XIII

[chemical structure]

wherein independently for each occurrence 3×CL is the trivalent cross-linker is selected from the group of trivalent cross-linkers set forth in Tables 13 and 14; P₁ is conjugated to each cross-linker of the first XTEN and is selected from the group consisting of the payloads set forth in Tables 11, 12, 18 and 21, P2 is a second payload conjugated to each cross-linker of the second XTEN and is selected from the group consisting of the payloads set forth in Tables 11, 12, 18 and 21, wherein the payload is the same or is different from the first payload, and P₃ is a third payload conjugated to each cross-linker of the third XTEN and is selected from the group consisting of the payloads set forth in Tables 11, 12, 18 and 21, wherein the payload is the same or is different from the first or the second payload; CL₁ is the first cross-linker, x is an integer from 1 to about 100, or 1 to about 50, or 1 to about 40, or 1 to about 20, or 1 to about 10, or 1 to about 5, or is 9, or is 3, or is 2, or is 1; CL2 is a second cross-linker, y is an integer from 1 to about 100, or 1 to about 50, or 1 to about 40, or 1 to about 20, or 1 to about 10, or 1 to about 5, or is 9, or is 3, or is 2, or is 1; and z is an integer from 1 to about 100, or 1 to about 50, or 1 to about 40, or 1 to about 20, or 1 to about 10, or 1 to about 5, or is 9, or is 3, or is 2, or is 1, with the proviso that x+y+z is ≥3; XTEN₁ is the first XTEN having at least 80%, or at least about 90%, or at least about 91%, or at least about 92%, or at least about 93%, or at least about 94%, or at least about 95%, or at least about 96%, or at least about 97%, or at least about 98%, or at least about 99%, or having 100% sequence identity to a sequence selected from the group of sequences set forth in Tables 2 and 3; XTEN₂ is the second XTEN having at least 80%, or at least about 90%, or at least about 91%, or at least about 92%, or at least about 93%, or at least about 94%, or at least about 95%. or at least about 96%, or at least about 97%, or at least about 98%, or at least about 99%, or having 100% sequence identity to a sequence selected from the group of sequences set forth in Tables 2 and 3; and XTEN₃ is the third XTEN having at least 80%, or at least about 90%, or at least about 91%, or at least about 92%, or at least about 93%, or at least about 94%, or at least about 95%, or at least about 96%, or at least about 97%, or at least about 98%, or at least about 99%, or having 100% sequence identity to a sequence selected from the group of sequences set forth in Tables 2 and 3 wherein XTEN₁, XTEN₂, and XTEN₃ are the same or are different XTEN sequences. In some embodiments, the conjugate of formula XIII further comprises a first payload wherein the payload is a targeting moiety with specific binding affinity to a target, wherein the targeting moiety is selected from the group consisting of the targeting moieties set forth in Tables 17-19 and 21, and at least one other of the payloads is a drug wherein the drug is selected from the group consisting of the drugs set forth in Table 11, Table 19, and Table 21. In one embodiment of the foregoing, the targeting moiety is LHRH or folate and the drug is selected from doxorubicin, paclitaxel, auristatin, monomethyl auristatin E (MMAE), monomethyl auristatin F, maytansine, dolastatin, calicheamicin, vinca alkaloid, camptothecin, mitomycin C, epothilone, hTNF, Il-12, bortezomib, ranpirnase, pseudomonas exotoxin, SN-38, and rachelmycin. In another embodiment of the trimeric XTEN conjugate composition, the composition has the configuration of formula XIV:

[chemical structure]

wherein independently for each occurrence; 3×CL is the trivalent cross-linker, CL1 is the first cross-linker conjugated to XTEN₁; CL2 is the second cross-linker conjugated to XTEN₂; x is an integer of 1 to about 10; y is an integer of 1 to about 10 with the proviso that x+y is ≥2; XTEN₁ is the first XTEN; XTEN₂ is the second XTEN; and XTEN₃ is the third XTEN wherein the XTEN is selected from the group consisting of the sequences set forth in Table 2. In one embodiment of the trimeric XTEN conjugate composition of formula XVI, the composition further comprises a single atom residue of a first payload conjugated to each first cross-linker of the first XTEN wherein the residue is selected from the group consisting of carbon, nitrogen, oxygen and sulfur; and a single atom residue of a second payload conjugated to each second cross-linker of the second XTEN wherein the residue is selected from the group consisting of carbon, nitrogen. oxygen and sulfur. In another embodiment of the trimeric XTEN conjugate composition of formula XVI, the composition further comprises a first payload conjugated to each first cross-linker of the first XTEN selected from the group consisting of the payloads set forth in Tables 11, 12, 18 and 21; and a second payload conjugated to each second cross-linker of the second XTEN selected from the group consisting of the payloads set forth in Tables 11, 12, 18 and 21, wherein the payload is the same or is different from the first payload. In one embodiment of the foregoing, the first payload is a targeting moiety with specific binding affinity to a target, wherein the targeting moiety is selected from the group consisting of the targeting moieties set forth in Tables 17-19 and 21, and the second payloads is a drug selected from the group consisting of the drugs set forth in Table 6, Table 18, and Table 21. In another embodiment of the foregoing, the first payload is a targeting moiety is selected from the group consisting of LHRH and folate, and the second payload is a drug is selected from the group consisting of doxorubicin, paclitaxel, auristatin, monomethyl auristatin E (MMAE), monomethyl auristatin F, maytansine, dolastatin, calicheamicin, vinca alkaloid, camptothecin, mitomycin C, epothilone, hTNF, Il-12, bortezomib, ranpirnase, pseudomonas exotoxin, SN-38, and rachelmycin. In one embodiment of the foregoing, the first payload is a drug selected from the group consisting of the drugs of Table 11 and the proteins of Table 12 and the second payload is different from the first payload and is selected from the group consisting of the drugs of Table 11 and the proteins of Table 12. In another embodiment of the foregoing, the first payload and the second payload are identical and are selected from the group consisting of the drugs of Table 11 and the proteins of Table 12. In another embodiment of the trimeric XTEN conjugate composition, the composition has the configuration of formula XV:

[chemical structure]

wherein independently for each occurrence; 3×CL is a trivalent cross-linker linking XTEN₁, XTEN₂, XTEN₃; CL1 is the first cross-linker conjugated to XTEN₁; x is an integer of 1 to about 10; XTEN₁ is the first XTEN wherein the XTEN is selected from the group consisting of the sequences set forth in Table 3; XTEN₂ is the second XTEN wherein the XTEN is selected from the group consisting of the sequences set forth in Table 2; and XTEN₃ is the third XTEN wherein the XTEN is selected from the group consisting of the sequences set forth in Table 2. In one embodiment of the trimeric XTEN conjugate composition configured as formula XVII, the composition further comprises a single atom residue of a first payload conjugated to each first cross-linker of the first XTEN wherein the residue is selected from the group consisting of carbon, nitrogen, oxygen and sulfur. In one embodiment of the trimeric XTEN conjugate composition configured as formula XVII, the composition further comprises a first payload conjugated to each first cross-linker of the first XTEN selected from the group consisting of the payloads set forth in Tables 11, 12, 18 and 21.

[0021] In another aspect, the invention relates, in part, to compositions of a first, a second, a third and a fourth XTEN conjugated to each other, resulting in tetrameric conjugate compositions. In some embodiments, the conjugate compositions comprise a first and a second and a third and a fourth XTEN wherein the XTEN are selected from the group consisting of the sequences set forth in Table 3, wherein the XTEN may be the same or they may be different, and in which the first and the second and the third and the fourth XTEN are conjugated to each other by the N-terminus using a tretravalent cross-linker wherein the tetravalent cross-linker is a tetravalent maleimide cluster. In one embodiment of the tetrameric conjugate, the first and the second and the third and the fourth XTEN are identical or are different and each has at least about 90%, or at least about 91%, or at least about 92%, or at least about 93%, or at least about 94%, or at least about 95%, or at least about 96%, or at least about 97%, or at least about 98%, or at least about 99%, or 100% sequence identity to a sequence selected from the group of sequences set forth in either Table 2 or Table 3. In another embodiment of the tetrameric conjugate, the first and the second and the third XTEN are identical or are different and at least 90%, 91%, 92%, 93%, 94%, or 95% of the individual molecules of each of the first XTEN have identical sequence length and at least 90%, 91%, 92%, 93%, 94%, or 95% of the individual molecules of each of the second XTEN have identical sequence length and at least 90%, 91%, 92%, 93%, 94%, or 95% of the individual molecules of each of the third XTEN have identical sequence length and at least 90%, 91%, 92%, 93%, 94%, or 95% of the individual molecules of each of the fourth XTEN have identical sequence length. In another embodiment of the tetrameric conjugate the first, the second, the third, and the fourth XTEN are the same and each has at least about 90%, or at least about 91%, or at least about 92%, or at least about 93%, or at least about 94%, or at least about 95%, or at least about 96%, or at least about 97%, or at least about 98%, or at least about 99%, or 100% sequence identity to a sequence selected from the group consisting of Seg 174, Seg 175, Seg 176, Seg 177, Seg 186, Seg 187, Seg 188, Seg 189, Seg 190, Seg 191, Seg 192, Seg 193, Seg 194, Seg 195, Seg 196, Seg 197, Seg 198, and Seg 199 set forth in Table 3. In another embodiment of the tetrameric conjugate, the first and the second XTEN are the same and each has at least about 90%, or at least about 91%, or at least about 92%, or at least about 93%, or at least about 94%, or at least about 95%, or at least about 96%, or at least about 97%, or at least about 98%, or at least about 99%, or 100% sequence identity to a sequence selected from the group consisting of Seg 174, Seg 175, Seg 176, Seg 177, Seg 186, Seg 187, Seg 188, Seg 189, Seg 190, Seg 191, Seg 192, Seg 193, Seg 194, Seg 195, Seg 196, Seg 197, Seg 198, and Seg 199 set forth in Table 3, and the third and the fourth XTEN are the same but are different from the first and the second XTEN and each has at least about 90%, or at least about 91%, or at least about 92%, or at least about 93%, or at least about 94%, or at least about 95%, or at least about 96%, or at least about 97%, or at least about 98%, or at least about 99%, or 100% sequence identity to a sequence selected from the group consisting of Seg 174, Seg 175, Seg 176, Seg 177, Seg 186, Seg 187, Seg 188, Seg 189, Seg 190, Seg 191, Seg 192, Seg 193, Seg 194, Seg 195, Seg 196, Seg 197, Seg 198, and Seg 199 set forth in Table 3. In another embodiment of the tetrameric conjugate, each XTEN comprises at least a first cysteine residue and the conjugate further comprises a first cross-linker conjugated to each cysteine residue of the first XTEN, a second cross-linker conjugated to each cysteine residue of the second XTEN, a third cross-linker conjugated to each cysteine residue of the third XTEN, and a fourth cross-linker conjugated to each cysteine residue of the fourth XTEN, wherein each cross-linker is selected from the group consisting of the cross-linkers set forth in Table 13. In some embodiments of the tetrameric conjugate compositions, the composition has the configuration of formula XVI

[chemical structure]

wherein independently for each occurrence: 4×CL is the tetravalent cross-linker, CL1 is the first cross-linker conjugated to XTEN₁; CL2 is the second cross-linker conjugated to XTEN₂; CL3 is the third cross-linker conjugated to XTEN₃; CL4 is the fourth cross-linker conjugated to XTEN₄; v is an integer of 1 to about 10; x is an integer of 1 to about 10; y is an integer of 1 to about 10; z is an integer of 1 to about 10 with the proviso that x+y+z is ≥4; XTEN₁ is the first XTEN; XTEN₂ is the second XTEN; XTEN₃ is the third XTEN; and XTEN₃ is the fourth XTEN. In another embodiment of the tetrameric conjugate composition, the composition further comprises a single atom residue of a first payload conjugated to each first cross-linker of the first XTEN wherein the residue is selected from the group consisting of carbon. nitrogen, oxygen and sulfur; a single atom residue of a second payload conjugated to each second cross-linker of the second XTEN wherein the residue is selected from the group consisting of carbon, nitrogen, oxygen and sulfur; a single atom residue of a third payload conjugated to each third cross-linker of the third XTEN wherein the residue is selected from the group consisting of carbon, nitrogen, oxygen and sulfur; and a single atom residue of a fourth payload conjugated to each fourth cross-linker of the fourth XTEN wherein the residue is selected from the group consisting of carbon. nitrogen, oxygen and sulfur. In another embodiment of the tetrameric conjugate composition, the composition further comprises a first payload conjugated to each first cross-linker of the first XTEN selected from the group consisting of the payloads set forth in Tables 11, 12, 18, and 21; a second payload conjugated to each second cross-linker of the second XTEN selected from the group consisting of the payloads set forth in Tables 11, 12, 18, and 21, wherein the payload is the same or is different from the first payload; a third payload conjugated to each third cross-linker of the third XTEN selected from the group consisting of the payloads set forth in Tables 11, 12, 18, and 21, wherein the payload is the same or is different from the first or the second payload; and a fourth payload conjugated to each fourth cross-linker of the fourth XTEN selected from the group consisting of the payloads set forth in Tables 11, 12, 18, and 21, wherein the payload is the same or is different from the first or the second or the third payload. In one embodiment of the tetrameric XTEN-payload conjugate composition, the first payload is a targeting moiety with specific binding affinity to a target wherein the targeting moiety is selected from the group consisting of the targeting moieties set forth in Tables 17-19 and 21, and at least one other of the second, third, and fourth payloads is a drug wherein the drug is selected from the group consisting of the drugs set forth in Tables 11, 18 and 21. In one embodiment of the tetrameric XTEN-payload conjugate composition, the first payload is a targeting moiety wherein the targeting moiety is selected from the group consisting of LHRH and folate, and at least one of the second, third and fourth payload is a drug selected from the group consisting of doxorubicin, paclitaxel, auristatin, maytansine, dolastatin, calicheamicin, vinca alkaloid, camptothecin, mitomycin C, epothilone, hTNF, Il-12, bortezomib, ranpirnase, pseudomonas exotoxin, SN-38, and rachelmycin. In another embodiment of the tetrameric XTEN-payload conjugate composition, the first payload is a targeting moiety with specific binding affinity to a target wherein the targeting moiety is selected from the group consisting of the targeting moieties set forth in Tables 17-19 and 21, and at least one other of the second, third, and fourth payloads is a drug wherein the drug is selected from the group consisting of the drugs set forth in Tables 11, 18 and 21, and wherein the XTEN, the targeting moiety, and the drug moiety correspond to any one of conjugates 1-290 set forth in Table 21.

[0022] In another aspect, the invention relates, in part, to compositions comprising multimeric XTEN molecules configured in a branched manner, wherein a solution of the composition has a reduced. In one embodiment, the invention provides a composition comprising a solution that comprises a multimeric XTEN having at least three XTEN fragments linked together in a branched manner (e.g. trimeric manner) wherein the viscosity of the solution is reduced by at least 5, 6, 7, 8, 9 or 10 cP in a solution containing 0100, 130, or 150 mg/ml of the trimeric XTEN preparation compared to a solution containing 0100, 130, or 150 mg/ml of the corresponding linear XTEN of equal molar concentration. In another embodiment, the invention provides a composition comprising a solution that comprises a multimeric XTEN having at least four XTEN fragments linked together in a branched manner (e.g. tetrameric manner) wherein the composition has a viscosity that is less than a solution comprising a corresponding linear XTEN having the same number of amino acids and the same molar concentration, wherein the viscosity of the solution is reduced by at least 5, 6, 7, 8, 9 or 10 cP in a solution containing 0100, 130, or 150 mg/ml of the trimeric XTEN preparation compared to a solution containing 0100, 130, or 150 mg/ml of the corresponding linear XTEN of equal molar concentration. In another embodiment, the invention provides a composition comprising a solution that comprises a multimeric XTEN having at least five XTEN fragments linked together in a branched manner (e.g. pentameric manner) wherein the composition has a viscosity that is less than a solution comprising a corresponding linear XTEN having the same number of amino acids and the same molar concentration, wherein the viscosity of the solution is reduced by at least 5, 6, 7, 8, 9 or 10 cP in a solution containing 0100, 130, or 150 mg/ml of the trimeric XTEN preparation compared to a solution containing 0100, 130, or 150 mg/ml of the corresponding linear XTEN of equal molar concentration. In the foregoing embodiments of this paragraph, the individual XTEN of the multimeric configurations are selected from the group consisting of the sequences set forth in Table 2 and Table 3.

[0023] In another embodiment, the invention provides compositions of a polypeptide having at least about 90%, or at least about 91%, or at least about 92%, or at least about 93%, or at least about 94%, or at least about 95%, or at least about 96%, or at least about 97%, or at least about 98%, or at least about 99%, or 100% sequence identity to a sequence selected from the group of sequences set forth in Table 52.

[0024] In another embodiment, the invention provides a pharmaceutical composition, comprising the conjugate of any one of the XTEN-payload conjugate embodiments described herein, and a pharmaceutically acceptable carrier. In one embodiment, the foregoing pharmaceutical composition has utility in the treatment of a condition selected from the group of conditions set forth in Table 16. In another embodiment, the foregoing pharmaceutical composition has utility for use in a pharmaceutical regimen for treatment of a subject, said regimen comprising the pharmaceutical composition. In another embodiment, the foregoing pharmaceutical regimen further comprises the step of determining the amount of pharmaceutical composition needed to achieve a beneficial effect in a subject having a condition selected from the group of conditions set forth in Table 16. In another embodiment, the foregoing pharmaceutical regimen used for treating the subject comprises administering the pharmaceutical composition in two or more successive doses to the subject at an effective amount, wherein the administration results in at least a 10%, or 20%, or 30%, or 40%, or 50%, or 60%, or 70%, or 80%, or 90% greater improvement of at least one, two, or three parameters associated with the condition compared to an untreated subject.

[0025] In another embodiment, the invention provides a conjugate of any one of the XTEN-payload conjugate embodiments described herein for use in the preparation of a medicament for treatment of a condition selected from the group of conditions set forth in Table 16.

[0026] In some embodiments, the invention provides methods of selecting a combination of payloads linked to XTEN as a therapeutic agent, the method comprising providing a library of XTENs comprising a plurality of XTEN sequences wherein each of said XTEN sequences is conjugated to at least a first payload and at least a second payload which is different from the first payload; from said library, selecting an XTEN sequence as the therapeutic agent if it exhibits an improved in vitro or in vivo parameter as compared to that of (1) an XTEN sequence conjugated to the first payload alone; and (2) an XTEN sequence conjugated to the second payload alone. In one embodiment of the method, the first payload and second payload are therapeutically effective for ameliorating a common disease (e.g. a disease to which both the first and second payload targets). In one embodiment of the method, the first drug and second drug are therapeutically effective for treating different symptoms of a common disease. In one embodiment of the method, the common disease is selected from cancer, cancer supportive care, cardiovascular, central nervous system, endocrine disease, gastrointestinal, genitourinary, hematological, HIV infection, hormonal disease, inflammation, autoimmune disease, infectious disease, metabolic disease, musculoskeletal disease, nephrology disorders, ophthalmologic diseases, pain, and respiratory. In one embodiment of the method, the first payload and second payload mediate their therapeutic effect via a common biological pathway. In one embodiment of the method, the first payload and second payload are different drugs selected from the group consisting of the drugs set forth in Table 11, Table 18 and Table 21. In one embodiment of the method, the first payload and second payload are different biologically active proteins selected from the group consisting of the proteins set forth in Table 12, Table 18 and Table 21. In one embodiment of the method, the first payload is a drug selected from the group consisting of the drugs set forth in Table 11, Table 18 and Table 21 and the second payload is a biologically active protein selected from the group consisting of the proteins set forth in Table 12, Table 18 and Table 21.

[0027] In another embodiment, the invention provides an isolated polypeptide comprising an extended recombinant polypeptide that is linked to an affinity purification tag via a proteolytic cleavage site having a sequence selected from SASRSA (SEQ ID NO: 21) or SASXSA (SEQ ID NO: 23) where X is R or K.

[0028] In another embodiment, the invention provides an isolated polypeptide comprising a polypeptide comprising an XTEN that is linked at its N-terminus to a first affinity purification tag via a proteolytic cleavage site having a sequence selected from SASRSA (SEQ ID NO: 21) or SASXSA (SEQ ID NO: 23) where X is R or K, and at its C-terminus to a second affinity purification tag via a proteolytic cleavage site having a sequence selected from SASRSA (SEQ ID NO: 21) or SASXSA (SEQ ID NO: 23) where X is R or K.

[0029] In another aspect, the invention relates to a method of treating a condition in a subject with an XTEN-payload conjugate composition. In one embodiment, the invention provides a method of treating a condition in a subject comprising administering an effective amount of the conjugate of any one of the XTEN-payload embodiments described herein to a subject in need thereof. In another embodiment, the invention provides a method of treating a condition in a subject comprising administering an effective amount of the conjugate of the group consisting of the conjugates set forth in Table 21 to a subject in need thereof. In the foregoing embodiments of this paragraph, the condition to be treated includes, but is not limited to, the conditions set forth in Table 13. In another embodiment, the invention provides a pharmaceutical composition comprising any of the XTEN-payload conjugate embodiments described herein and a pharmaceutically acceptable carrier for use in a treatment regimen, the regimen comprising administering two or more consecutive doses of the pharmaceutical composition.

[0030] In one embodiment, the invention provides the use of a conjugate of any one of the XTEN-payload embodiments described herein for the preparation of a medicament for treatment of a condition selected from the group of conditions set forth in Table 16. In another embodiment, the invention provides a pharmaceutical composition for treatment of a condition selected from the group of conditions set forth in Table 16. comprising an effective amount of a conjugate of any one of the XTEN-payload embodiments described herein.

[0031] In another embodiment, the invention provides a composition having the structure set forth in FIG. 117.

[0032] It is specifically contemplated that the conjugate embodiments can exhibit one or more or any combination of the properties disclosed herein. In addition, any of the XTEN compositions disclosed herein can be utilized in any of the methods disclosed herein.

### INCORPORATION BY REFERENCE

[0033] All publications, patents, and patent applications mentioned in this specification are herein incorporated by reference to the same extent as if each individual publication, patent, or patent application was specifically and individually indicated to be incorporated by reference.

### BRIEF DESCRIPTION OF THE DRAWINGS

[0034] The features and advantages of the invention may be further explained by reference to the following detailed description and accompanying drawings that sets forth illustrative embodiments

[0035] FIGS. 1A-1E show schematics of XTEN suitable for conjugation with payloads. FIG. 1A shows unmodified XTEN. FIG. 1B shows a cysteine-engineered XTEN with an internal cysteine with a thiol side chain; below is an XTEN with an a reactive N-terminal amino group; below is an XTEN with an N-terminal cysteine with a thiol reactive group. FIG. 1C shows cysteine-engineered XTEN with multiple internal cysteines. FIG. 1D shows two variations of a cysteine-engineered XTEN with an internal cysteine with a thiol side chain and a reactive N-terminal amino group and, at the bottom, a shows a cysteine- and lysine-engineered XTEN with internal cysteines and internal lysines. FIG. 1E is a schematic of another embodiment.

[0036] FIG. 2 shows a conjugation reaction utilizing NHS-esters and their water soluble analogs sulfo-NHS-esters) reacting with a primary amino group to yield a stable amide XTEN-payload product.

[0037] FIG. 3 shows a conjugation reaction utilizing thiol groups and an N-maleimide. The maleimide group reacts specifically with sulfhydryl groups when the pH of the reaction mixture is between pH 6.5 and 7.5, forming a stable thioether linkage that is not reversible.

[0038] FIG. 4 shows a conjugation reaction utilizing haloacetyls. The most commonly used haloacetyl reagents contain an iodoacetyl group that reacts with sulfhydryl groups at physiological pH. The reaction of the iodoacetyl group with a sulfhydryl proceeds by nucleophilic substitution of iodine with a thiol producing a stable thioether linkage in the XTEN-payload.

[0039] FIG. 5 shows a conjugation reaction utilizing pyridyl disulfides. Pyridyl disulfides react with sulfhydryl groups over a broad pH range (the optimal pH is 4-5) to form disulfide bonds linking XTEN to payloads.

[0040] FIGS. 6A-6B show a conjugation reaction utilizing zero-length cross-linkers wherein the cross-linkers are used to directly conjugate carboxyl functional groups of one molecule (such as a payload) to the primary amine of another molecule (such as an XTEN).

[0041] FIG. 7 shows different configurations of XTEN precursors that are multifunctional (or multivalent), including dedrimers. Non-limiting examples of trifunctional linkers are “Y-shaped” sulfhydryl-reactive TMEA (Tris-(2-Maleimidoethyl)amine) and amine-reactive TSAT (Tris-(succimimidyl aminotricetate). Any combination of reactive moieties can be designed using a scaffold polymer, either linear (forming a “comb” configuration) or branched (forming a “dendrimer” configuration), for multivalent display.

[0042] FIG. 8 shows a conjugation reaction utilizing the Huisgen 1,3-dipolar cycloaddition of alkynes to azides to form 1,4-disubstituted-1,2,3-triazoles, as shown.

[0043] FIG. 9 shows a conjugation reaction using thio-ene based click chemistry that may proceed by free radical reaction, termed thiol-ene reaction, or anionic reaction, termed thiol Michael addition.

[0044] FIG. 10 shows a conjugation reaction utilizing click chemistry based on reactions between hydrazides and aldehydes, resulting in the illustrated hydrazone linkage in the XTEN-payload.

[0045] FIG. 11 shows a reaction between a C-terminal acylazide and a primary amino group resulting in the formation of an amide bond.

[0046] FIG. 12 shows a conjugation reaction utilizing Native Chemical Ligation (NCL) involving a C-terminal thioester as an electrophile and N-terminal Cysteine as a nucleophile. The result of this reaction is a native amide bond at the ligation site of the XTEN-payload composition.

[0047] FIG. 13 shows a conjugation reaction utilizing expressed protein ligation (EPL) methodology. The EPL method is based on protein splicing, the process in which a protein undergoes an intramolecular rearrangement resulting in the extrusion of an internal sequence (intein) and the joining of the lateral sequences (exteins). In the method, the fused protein undergoes an N-S shift when the side chain of the first cysteine residue of the intein portion of the precursor protein nucleophilically attacks the peptide bond of the residue immediately upstream (that is, for example, the final residue of XTEN) to form a linear thioester intermediate, followed by a rearrangement to form to form an amide bond between the XTEN-cross-linker and the payload.

[0048] FIG. 14 shows a conjugation reaction utilizing traceless Staudinger ligation, like Native Chemical Ligation (NCL), resulting in a native amide bond at the ligation site

[0049] FIG. 15 shows a conjugation reaction utilizing enzymatic ligation. Transglutaminases are enzymes that catalyze the formation of an isopeptide bond between the γ-carboxamide group of glutamine of a payload peptide or protein and the ε-amino group of a lysine in a lysine-engineered XTEN (or an N-terminal amino group), thereby creating inter- or intramolecular cross-links between the XTEN and payload.

[0050] FIG. 16 shows enzymatically-created XTEN-payload compositions utilizing the sortase A transpeptidase enzyme from Staphylococcus aureus to catalyze the cleavage of a short 5-amino acid recognition sequence LPXTG (SEQ ID NO: 24) between the threonine and glycine residues of Protein1 that subsequently transfers the acyl-fragment to an N-terminal oligoglycine nucleophile of Protein1. By functionalizing the Protein2 to contain an oligoglycine, the enzymatic conjugation of the two proteins is accomplished in a site-specific fashion to result in the desired XTEN-payload composition. FIG. 16 discloses SEQ ID NOS 1175-1176, respectively, in order of appearance.

[0051] FIGS. 17A-17B show various XTEN-cross-linker precursor segments that are used as reactants to link to payloads or to other XTEN reactants. FIG. 17A is intended to show that the 1B represents the remaining reactive group of the precursors on the right. FIG. 17B shows similar reactive precursors with either multiple (left) or single (right) payload A molecules conjugated to the XTEN.

[0052] FIG. 18 shows exemplary permutations of XTEN-cross-linker precursor segments with two reactive groups of cross-linkers or reactive groups of an incorporated amino acid that are used as reactants to link to payloads or to other XTEN reactants. The 1B and 2B represent reactive groups that will, in other figures, react with a like-numbered reactive group; 1 with 1 and 2 with 2, etc.

[0053] FIGS. 19A-19C are intended to show examples of various reactants and the nomenclature for configurations illustrated elsewhere in the Drawings. FIG. 19A shows various forms of reactive XTEN segment precursors, each with a different reactive group on the N-terminus. FIG. 19B shows various cross-linkers with 2, 3 or 4 reactive groups. In the first case, the divalent cross-linker is a heterofunctional linker that reacts with two different types of reactive groups, represented by “2” and “1”. In the case of the trivalent and tetravalent cross-linker, each reacts with only one type of reactive group, represented by “1”. FIG. 19C illustrates the nomenclature of the reaction products of two XTEN segment precursors. In the top version, a 1A was reacted with a 1B to create a dimeric XTEN linked at the N-termini, with the residue of the cross-linker indicated by 1A_{R}-1B_{R}, while the bottom version is also a dimeric XTEN linked at the N-termini, with the residue of the cross-linker indicated by 2A_{R}-2B_{R}.

[0054] FIGS. 20A-20B illustrate the creation of various XTEN precursor segments. FIG. 20A shows the steps of making an XTEN polypeptide, followed by reaction of the N-terminus with the cross-linker with 2B-1A reactive groups, with the IA reacting with the N-terminal 1B (e.g., an alpha amino acid) to create the XTEN precursor 2 with the reactive group 2B. FIG. 20B shows the sequential addition of two cross-linkers with 2A reactive groups to 2B reactive groups of the XTEN, resulting in XTEN precursor 4, which is then reacted with a cross-linker at the N-terminus between a reactive 1B and the IA of a cross-linker, resulting in XTEN precursor 5, with reactive groups 4B and 3B. In such case, the XTEN-precursors 5 then could serve as a reactant with two different payloads or XTEN.

[0055] FIGS. 21A-21B illustrate examples of multimeric conjugates. FIG. 21A illustrates how three molecules of an XTEN with a conjugated payload A can be conjugated to a trimeric cross-linker, resulting in a trimeric XTEN-payload conjugate with three A payloads. FIG. 21B illustrates how three molecules of a polypeptide with an A payload can be conjugated to a trimeric cross-linker, resulting in a trimeric XTEN-payload conjugate with three polypeptides with A payloads.

[0056] FIGS. 22A-22D illustrate examples of multivalent XTEN conjugates that can originate from XTEN precursors with a single cysteine. The amino group in the XTEN precursor acts as reactive group 2B and the thiol group as reactive group 1B. The XTEN precursor can be cross-linked using cross-linker that can react with group 1B. The valency of the cross-linker controls the valency of the resulting intermediate. This cross-linked intermediate can be reacted with a payload carrying a reactive group 2A that can react with the amino group forming the conjugation link 2A-BR. FIG. 22A is an XTEN precursor with single thiol group. FIG. 22B is a divalent conjugate. FIG. 22C is a trimeric conjugate. FIG. 22D is a tetrameric conjugate.

[0057] FIGS. 23A-23B illustrate examples of multivalent XTEN conjugates that can originate from XTEN precursors with a single cysteine. The amino group in the XTEN precursor acts as reactive group 1B and the thiol group as reactive group 2B. The XTEN precursor can be cross-linked using cross linker that can react with group 1B. The valency of the cross linker controls the valency of the resulting intermediate. This cross linked intermediate can be reacted with a payload carrying a reactive group 2A that can react with the thiol group forming the conjugation link 2A-BR. FIG. 23A illustrates the thiol group located close to the C-terminus of XTEN. As a result the payload is located at the distal ends of the final trimeric conjugate. FIG. 23B illustrates that the thiol group is located close to the N-terminus of XTEN. As a result the payload is located at the proximal ends of the final conjugate resulting in increased payload shielding by XTEN.

[0058] FIGS. 24A-24C illustrate an example of the creation of a “comb” configuration. FIG. 24A is a XTEN-payload precursor comprising linker reactive group IA. The payload can be recombinantly fused to XTEN or it can be conjugated. FIG. 24B illustrates an XTEN-precursor with the comb-like cross-linkers. This can be an XTEN that carries a multiple reactive groups B. FIG. 24C shows the final product in the “comb” configuration, with five Payload A. Valency is controlled by the number of reactive groups in the Comb-like precursor.

[0059] FIGS. 25A-25B illustrate various configurations of bispecific conjugates with two payloads. FIG. 25A illustrates configurations with one molecule each of two payloads, while FIG. 25B illustrates various configurations with multiple copies of one or both payloads.

[0060] FIGS. 26A-26B illustrate various examples of conjugates with high valency. Conjugations sites of payloads can grouped (FIG. 26A) or interspersed (FIG. 26B).

[0061] FIGS. 27A-27B illustrate the preparation of bispecific conjugates from an XTEN precursor carrying both amino and thiol groups in which many chemistries can be used and the order of payload addition can vary. One can generate linker-conjugates as precursors. FIG. 27A shows the creation of a single XTEN precursor to which two different payloads are attached. FIG. 27B shows a segment approach starting from two XTEN precursor molecules. This approach allows one to conjugate both payloads to XTEN using the same type of linker chemistry. In this case, the figure shows thiol as the group to which payloads are conjugated, and then the N-terminus of each segment is modified with a cross-linker to enable head-to-head segment conjugation, resulting in a dimeric, bispecific conjugate final product.

[0062] FIGS. 28A-28C show examples of multivalent conjugates combining an antibody, XTEN, and a payload. Such constructs can have different valencies and provide many benefits in that the XTEN can have a cleavable linker, XTEN can provides solubility to the composition, and it can allow adjustment of the drug load per IgG, and the XTEN can be pre-conjugated with drug to simplify manufacturing. FIG. 28A illustrates two XTENs conjugated to IgG at Cys residues in the hinge region. FIG. 28B illustrates four XTEN conjugated to IgG using Cys in the hinge region. FIG. 28C illustrates XTEN conjugated outside of hinge. This can be done by inserting Cys to control conjugation site or by random conjugation to Lys side chains.

[0063] FIG. 29 shows examples of the construction of conjugates combining an antibody, XTEN, and a payload. The antibody can have one or multiple reactive groups 1B. XTEN can be conjugated to one or multiple Payloads A. In addition XTEN can carry a reactive group 1A that preferentially reacts with the reactive group 1B on the antibody. The location of reactive groups 1B in the antibody controls the number and location of XTENs that are conjugated to the antibody, resulting in the final product.

[0064] FIGS. 30A-30C show examples of conjugates comprising a targeting moiety, XTEN, and a payload. Targeting moieties can be peptides, peptoids, or receptor ligands. FIG. 30A shows 1×(1×3) conjugate. FIG. 30B shows 1×2(1×3) conjugate. FIG. 30C shows a 3×1(1×3) conjugate.

[0065] FIG. 31 shows examples of conjugates comprising multiple different targeting moieties, XTEN, and a payload. Targeting moieties can be peptides, peptoids, receptor ligands.

[0066] FIG. 32 shows examples of conjugates comprising a targeting moiety, XTEN, and a multiple different payloads.

[0067] FIG. 33 shows examples of combinatorial XTEN conjugates. Payloads A, B, C, and D carry a reactive group 2A that reacts with reactive group 2B on the XTEN precursor. In the next step, Payloads E and F carry a reactive group 1A that reacts with reactive group 1B on XTEN, resulting in a library of different permutations of bispecific conjugates. In this case, the reactive groups 1B and 2B are thiol- and amino-groups, respectively.

[0068] FIG. 34 shows an example of the creation of a combinatorial XTEN conjugate library. Payloads A, B, C are conjugated to XTEN carrying reactive group IA, resulting in one set of XTEN-precursor segments. Payloads E, F, and G are conjugated to XTEN carrying reactive group 1B, resulting in a second set of XTEN-precursor segments. These segments are subjected to combinatorial conjugation and then are purified from reactants. This enables the formation of combinatorial products that can be immediately subjected to in vitro and in vivo testing. In this case, reactive groups IA and 1B are the alpha-amino groups of XTEN with or without a bispecific cross-linker. In one example, the IA is an azide and 1B is an alkyne or vice versa, while the payloads are attached to XTEN via thiol groups in XTEN.

[0069] FIG. 35 shows an example of the creation of a combinatorial XTEN conjugate library that optimizes the ratio between two payloads. Each library member carries a different ratio of payload A and payload E.

[0070] FIG. 36 shows an example of the creation of a combinatorial XTEN conjugate library that creates combinations of targeting moieties and payloads. The targeting moieties 1, 2, and 3 are conjugated to XTEN carrying reactive group IA. Payloads E, F, and G are conjugated to XTEN carrying reactive group 1B. These segments are subjected to combinatorial conjugation, enabling the formation of combinatorial products where each library member comprises targeting moieties and payloads. All XTEN segments carrying payloads and conjugation groups can be purified as combinatorial products that can be immediately subjected to in vitro and in vivo testing.

[0071] FIG. 37 shows an example of an XTEN conjugate comprising targeting moieties and payloads that exert selective action on the surface of a target cell, such as a tumor cell. The particular design of the dimeric XTEN conjugate comprises LHRH and doxorubicin. This conjugate binds to the LHRH-receptor on that is over-expressed on many cancer cells. Receptor binding results in internalization followed by proteolytic break down and the intracellular liberation of doxorubicin, which is toxic to the cell.

[0072] FIG. 38 is a schematic flowchart of representative steps in the assembly, production and the evaluation of a XTEN.

[0073] FIG. 39 is a schematic flowchart of representative steps in the assembly of an XTEN polynucleotide construct encoding a fusion protein. Individual oligonucleotides 501 are annealed into sequence motifs 502 such as a 12 amino acid motif (“12-mer”), which is ligated to additional sequence motifs from a library to create a pool that encompasses the desired length of the XTEN 504, as well as ligated to a smaller concentration of an oligo containing BbsI, and KpnI restriction sites 503. The resulting pool of ligation products is gel-purified and the band with the desired length of XTEN is cut, resulting in an isolated XTEN gene with a stopper sequence 505. The XTEN gene is cloned into a stuffer vector. In this case, the vector encodes an optional CBD sequence 506 and a GFP gene 508. Digestion is then performed with BbsI/HindIII to remove 507 and 508 and place the stop codon. The resulting product is then cloned into a BsaI/HindIII digested vector, resulting in gene 500 encoding an XTEN.

[0074] FIG. 40 is a schematic flowchart of representative steps in the assembly of a gene encoding XTEN, its expression, conjugation with a payload and recovery as an XTEN-payload, and its evaluation as a candidate product.

[0075] FIGS. 41A, 41B, and 41C show generalized XTEN with either N- or C-terminal tags or N- and C-terminal sequences optimized for purification using methods illustrated in FIG. 42.

[0076] FIG. 42 shows a generalized scheme for purification of XTEN with, in this illustrative embodiment, two tags in which a two-step purification method to capture first one tag and then the second can be utilized to remove truncated XTEN from fermentation, resulting in the highly purified target XTEN entity.

[0077] FIG. 43 shows an SDS-PAGE gel of the CBD-TEV site-XTEN_AE864 and CBD-TEV site-XTEN_AE864-GFP constructs expressed in E. coli BL21 DE3 rne-131 and E. coli BL21 DE3 cells from shake flask cultures as described in Example 10. Gel lane samples with MW markers and expressed proteins from constructs are: 1) MW marker; 2-5) lysates from 4 independent flasks expressing CBD-TEV site-XTEN_AE864-GFP fusion protein in E. coli BL21 DE3; 6-9) lysates from 4 independent flasks expressing CBD-TEV site-XTEN_AE864-GFP fusion protein in E. coli BL21 DE3 rne-131; 10-13) lysates from 4 independent flasks expressing CBD-TEV site-XTEN_AE864 fusion protein in E. coli BL21 DE3; 14-17) lysates from 4 independent flasks expressing CBD-TEV site-XTEN_AE864 fusion protein in E. coli BL21 DE3 rne-131. Full-length protein spots appear within the outline box. Bands of lower molecular weight are host-cell proteins.

[0078] FIG. 44 shows relative GFP fluorescence of the CBD-TEV site-XTEN_AE864-GFP expressed in E. coli BL21 DE3 rne-131 and E. coli BL21 DE3 cells from shake flask cultures as described in Example 10.

[0079] FIG. 45 shows an SDS-PAGE gel of the CBD-R-C-XTEN_AE864-RH8 (“H8” disclosed as SEQ ID NO: 20) (EC682) and CBD-R-XTEN_AE864-RH8 (“H8” disclosed as SEQ ID NO: 20) (EC683) constructs expressed in E. coli fermentations as described in Example 17. Gel lane samples with MW markers and expressed proteins from constructs are: 1) MW marker, E. coli fermentation #EC682 clarified soluble lysates time points after inoculation 2) 16 hours, 3) 24 hours, 4) 40 hours, 5) 45 hours; E. coli fermentation #EC683 clarified soluble lysates at time points after inoculation 6) 16 hours, 7) 24 hours, 8) 40 hours, 9) 45 hours; Purified CBD-R-XTEN_AE864-RH8 (“H8” disclosed as SEQ ID NO: 20) reference standard 10) 1 microgram, 11) 2 micrograms, and 12) 4 micrograms. For the E. coli fermentation clarified soluble lysates each lane represents 3 microliters of the fermenter culture. Full-length protein spots appear within the outline box. Bands of lower molecular weight are host-cell proteins.

[0080] FIG. 46 shows the trace output of Toyopearl Phenyl 650 M Hydrophobic Interaction Chromatography, as described in Example 18.

[0081] FIG. 47 shows a non-reducing 4-12% Bis-Tris SDS-PAGE analysis of Toyopearl Phenyl 650 M Hydrophobic Interaction Chromatography fractions, as indicated in the figure and as described in Example 18. The materials per lane are: Lane 1: Marker; Lane 2: Load 7.5 μl; Lane 3: Flow-through 1; Lane 4: Flow-through 2; Lane 5: Elution fraction E1; Lane 6: Elution fraction E2; Lane 7: Elution fraction E3; Lane 8: Elution fraction E4; Lane 9: Elution fraction ES; Lane 10: Elution fraction E6; Lane 11: Elution fraction E7; Lane 12: Elution fraction E8.

[0082] FIGS. 48A and 48B show a non-reducing 4-12% Bis-Tris SDS-PAGE analysis of Toyopearl IMAC Chromatography flow through, wash (FIG. 48A) and elution fractions (FIG. 48B(non-reducing) as described in Example 18.

[0083] FIG. 49 shows a non-reducing SDS-PAGE analysis of the trypsin-digested IMAC pool described in Example 18. FIG. 49 discloses “H8” as SEQ ID NO: 20.

[0084] FIG. 50 shows the elution profile of the MacroCap Q Chromatography described in Example 18.

[0085] FIGS. 51A-51C show a 4-12% Bis-Tris SDS-PAGE analysis of the MacroCap Q elution fractions, as described in Example 18. FIG. 51A, flow-through, Coomassie staining. FIG. 51B, elution fractions, Coomassie staining. FIG. 51C, elution fractions, silver staining.

[0086] FIG. 52 shows the traces from C18 RP-HPLC analysis of MacroCap Q elution fractions, as described in Example 18.

[0087] FIG. 53 shows a trace from a C18 RP-HPLC of the MacroCap Q Elution Pool, as described in Example 18.

[0088] FIG. 54 shows a non-reducing SDS-PAGE analysis of the Toyopearl Phenyl 650 M Hydrophobic Interaction Chromatography fractions, as described in Example 19.

[0089] FIG. 55 shows a non-reducing SDS-PAGE analysis of Toyopearl IMAC Chromatography fractions, as described in Example 19.

[0090] FIG. 56 shows a non-reducing 4-12% Bis-Tris SDS-PAGE/silver staining analysis of the MacroCap Q Elution fractions as described in Example 19.

[0091] FIG. 57 shows traces from C18 RP-HPLC analysis of MacroCap Q elution fractions, as described in Example 19.

[0092] FIG. 58 shows the trace from C18 RP-HPLC analysis of the MacroCap Q elution pool described in Example 19.

[0093] FIG. 59 shows an SDS-PAGE analysis of XTEN constructs with experimental tags after expression in E. coli as described in Example 20. Soluble lysates were loaded on the 4-12% Bis-Tris polyacrylamide gel, with amounts loaded per lane equivalent to 36 μl of cell culture suspension. The gel was stained with Coomassie Blue stain using standard methods.

[0094] FIG. 60 shows an SDS-PAGE analysis of the RP11-XTEN-His8 (“His8” disclosed as SEQ ID NO: 20) construct expressed in E. coli, as described in Example 20. Heat-treated soluble lysates were loaded on the 4-12% Bis-Tris polyacrylamide gel with amounts equivalent to 1 or 2 μl of cell culture suspension, respectively. The gel was stained with Coomassie Blue stain. The gel demonstrates that essentially all the expressed RP11-XTEN-His8 (“His8” disclosed as SEQ ID NO: 20) protein was found in the pelleted fraction. FIG. 60 discloses “H8” as SEQ ID NO: 20.

[0095] FIG. 61 shows an SDS-PAGE analysis of the MacroCap SP purification of RP11-XTEN-His8 (“His8” disclosed as SEQ ID NO: 20) polypeptide described in Example 21. Fractions were analyzed by 4-12% SDS-PAGE followed by Coomassie staining.

[0096] FIG. 62 shows an SDS-PAGE analysis of the IMAC purification of the RP11-XTEN-His8 (“His8” disclosed as SEQ ID NO: 20) polypeptide described in Example 21. Fractions were analyzed by 4-12% SDS-PAGE followed by Coomassie staining.

[0097] FIGS. 63A-63B show an SDS-PAGE analysis of the trypsin digestion of RP11-XTEN-His8 (“His8” disclosed as SEQ ID NO: 20) protein purified by two chromatographic steps (SP+IMAC) described in Example 21. Preparations were analyzed by 4-12% SDS-PAGE followed by Coomassie staining (FIG. 63A) and silver staining (FIG. 63B).

[0098] FIGS. 64A-64C show the results of the analysis of the conjugation reaction of DBCO-Mal to the 3× Thiol-XTEN as described in Example 23. FIG. 64A shows the C18 RP-HPLC analysis of the reaction mixture. A 20 μg protein sample was loaded on a Phenomenex Jupiter C18 5 uM 300 A 4.6 mm×150 mm column. The proteins were eluted with a 5-50% gradient of acetonitrile in 0.1% trifluoroacetic acid. FIG. 64B shows the HIC purification of DBCO-XTEN reaction product. FIG. 64C shows the C18 RP-HPLC analysis of the HIC-purified DBCO-XTEN reaction product.

[0099] FIGS. 65A-65B show results from trypsin cleavage of a double tagged precursor XTEN, as described in Example 24. FIG. 65A shows a 4-12% Bis-Tris SDS-PAGE analysis of protein samples loaded at 2 pg per lane. The gel was stained with an Invitrogen SimplyBlue SafeStain. FIG. 65B shows a 4-12% Bis-Tris SDS-PAGE analysis of protein samples loaded at 0.5 μg per lane. The gel was stained with a Pierce Silver Stain Kit.

[0100] FIGS. 66A-66C show results of an SDS-PAGE analysis of MacroCap Q purification of trypsin digested double tagged precursor, as described in Example 24. FIG. 66A shows a 4-12% Bis-Tris SDS-PAGE analysis of protein samples loaded at 3 μg per lane. The gel was stained with Invitrogen SimplyBlue SafeStain. FIG. 66B shows a 4-12% Bis-Tris SDS-PAGE analysis of protein samples loads at 0.5 μg per lane. The gel was stained with a Pierce Silver Stain Kit. FIG. 66C shows a 4-12% Bis-Tris SDS-PAGE analysis of protein samples loaded at 0.5 μg per lane. The gel was stained with a Pierce Silver Stain Kit.

[0101] FIGS. 67A-67C show results from a C18 RP-HPLC test for residual trypsin activity. FIG. 67A is the trace output of analysis of synthetic [G2]GLP2 peptide in intact form. FIG. 67B is the trace output of analysis of synthetic [G2]GLP2 peptide digested with bovine trypsin. FIG. 67C is the trace output of analysis of XTEN_AE869_Am1,C2 spiked with [G2]GLP2 and incubated overnight at 37° C., as described in Example 24.

[0102] FIGS. 68A-68C show preparation of GLP2-XTEN conjugate from GLP2-Cys peptide and 1× Amino-XTEN as described in Example 26, 20 μg protein samples were loaded on Phenomenex Jupiter C18 5 uM 300 A 4.6 mm×150 mm column. Proteins were eluted with 5-50% gradient of acetonitrile in 0.1% trifluoroacetic acid and detected by absorbance at 214 nm (left panels A-C). 100 μg protein samples were desalted using NanoSep 3K Omega centrifugal devices (Pall Corp.). Protein solutions in 50% acetonitrile, 0.5% formic acid were infused into high-resolution mass spectrometer at flow rate 10 ul/min. ESI-MS spectra were acquired in 800-1600 amu range and reconstructed into zero-charge spectra using Bayesian Protein Reconstruction Software (right panels A-C). FIG. 68A: initial 1× Amino-XTEN protein. FIG. 68B: product of the reaction between 1× Amino-XTEN and sulfo-SMCC cross-linker. FIG. 68C: purified GLP2-XTEN conjugate after reaction between GLP2-Cys and N-Mal-XTEN.

[0103] FIGS. 69A-69B show preparation of GLP2-XTEN conjugate from GLP2-Mal peptide and 1× Thiol-XTEN as described in Example 27, 20 μg protein samples were loaded on Phenomenex Jupiter C18 5 uM 300 A 4.6 mm×150 mm column. Proteins were eluted with 5-50% gradient of acetonitrile in 0.1% trifluoroacetic acid and detected by absorbance at 214 nm (left panels A, B). 100 μg protein samples were desalted using NanoSep 3K Omega centrifugal devices (Pall Corp.). Protein solutions in 50% acetonitrile, 0.5% formic acid were infused into high-resolution mass spectrometer at flow rate 10 ul/min. ESI-MS spectra were acquired in 800-1600 amu range and reconstructed into zero-charge spectra using Bayesian Protein Reconstruction Software (right panels A, B). FIG. 69A: initial 1× Thiol-XTEN protein. FIG. 69B: product of the reaction between GLP2-Mal and 1× Thiol-XTEN.

[0104] FIGS. 70A-70B show the results of the purification of GLP2-XTEN using preparative C4 RP-HPLC as described in Example 27. FIG. 70A shows a chromatography profile of preparative RP-HPLC. A fraction at 56-62 min was collected and evaporated under vacuum. FIG. 70B shows an analysis by C18 RP-HPLC for purified GLP2-XTEN.

[0105] FIGS. 71A-71C show results of the conjugation of DBCO-Mal to 1× Thiol-XTEN, as described in Example 28. FIG. 71A shows C18 RP-HPLC analysis of the reaction mixture. A 20 μg protein sample was loaded on Phenomenex Jupiter C18 5 uM 300 A 4.6 mm×150 mm column. Proteins were eluted with a 5-50% gradient of acetonitrile in 0.1% trifluoroacetic acid. FIG. 71B shows the HIC purification of DBCO-XTEN. FIG. 71C shows the C18 RP-HPLC analysis of the HIC-purified DBCO-XTEN.

[0106] FIGS. 72A-72B show results of analytical assays of XTEN conjugated with cross-linked FITC, as described in Example 31. FIG. 72A shows the co-migration in a gel imaged by UV light box to show the large apparent MW of FITC-containing conjugated species, also detected by SEC at OD214 (protein signal) and OD495 (FITC signal) in a SEC column, indicating successful labeling of the XTEN with minimal free dye contamination. The materials by lane (left to right, after the MW standards are: labeled FITC-CL-CBD-XTEN; labeled FITC-CL-XTEN; purified FITC-CL-XTEN; purified FITC-CL-XTEN; and purified FITC-CL-XTEN. The gel was imaged by UV light box to show FITC apparent MW of FITC containing species. FIG. 72B shows the results of SEC analysis of FITC-conjugated XTEN, showing the overlap of the output of materials detected at OD214 and OD495, and also the apparent large molecular weight.

[0107] FIG. 73 shows results of SEC analyses of the peak elution fractions of conjugates of GFP cross-linked to XTEN and free GFP, as described in Example 32. Cross-linking was confirmed by co-migration of the OD214 protein signal and OD395 GFP signal in the SEC column.

[0108] FIG. 74 shows the results of pharmacokinetic assays of GFP-X-XTEN and FITC-X-XTEN tested in cynomolgus monkeys, as described in Example 33.

[0109] FIG. 75 shows the pharmacokinetic profile (plasma concentrations) in cynomolgus monkeys after single doses of different compositions of GFP linked to unstructured polypeptides of varying length, administered either subcutaneously or intravenously, as described in Example 33. The compositions were GFP-L288, GFP-L576, GFP-XTEN_AF576, GFP-Y576 and XTEN_AD836-GFP. Blood samples were analyzed at various times after injection and the concentration of GFP in plasma was measured by ELISA using a polyclonal antibody against GFP for capture and a biotinylated preparation of the same polyclonal antibody for detection. Results are presented as the plasma concentration versus time (h) after dosing and show, in particular, a considerable increase in half-life for the XTEN_AD836-GFP, the composition with the longest sequence length of XTEN. The construct with the shortest sequence length, the GFP-L288 had the shortest half-life.

[0110] FIGS. 76A-76C show an SDS-PAGE gel of samples from a stability study of the fusion protein of XTEN_AE864 fused to the N-terminus of GFP. The GFP-XTEN was incubated in cynomolgus plasma and rat kidney lysate for up to 7 days at 37° C., as described in Example 55. In addition, GFP-XTEN administered to cynomolgus monkeys was also assessed. Samples were withdrawn at 0, 1 and 7 days and analyzed by SDS PAGE followed by detection using Western analysis and detection with antibodies against GFP. FIG. 76A shows the sequence of XTEN_AE864 showed negligible signs of degradation over 7 days in plasma. FIG. 76B shows in vivo stability of the fusion protein was tested in plasma samples wherein the GFP_AE864 was immunoprecipitated and analyzed by SDS PAGE. Samples that were withdrawn up to 7 days after injection showed very few signs of degradation. FIG. 76C shows XTEN_AE864 was rapidly degraded in rat kidney lysate over 3 days.

[0111] FIG. 77 shows the near UV circular dichroism spectrum of Ex4-XTEN_AE864, performed as described in Example 56.

[0112] FIG. 78 shows results of a size exclusion chromatography analysis of glucagon-XTEN construct samples measured against protein standards of known molecular weight, with the graph output as absorbance versus retention volume, as described in Example 58. The glucagon-XTEN constructs are 1) glucagon-Y288; 2) glucagonY-144; 3) glucagon-Y72; and 4) glucagon-Y36. The results indicate an

[0113] FIG. 79 is a schematic of the logic flow chart of the algorithm SegScore (Example 59). In the figure the following legend applies: i, j—counters used in the control loops that run through the entire sequence; HitCount—this variable is a counter that keeps track of how many times a subsequence encounters an identical subsequence in a block; SubSeqX—this variable holds the subsequence that is being checked for redundancy; SubSeqY—this variable holds the subsequence that the SubSeqX is checked against; BlockLen—this variable holds the user determined length of the block; SegLen—this variable holds the length of a segment. The program is hardcoded to generate scores for subsequences of lengths 3, 4, 5, 6, 7, 8, 9, and 10; Block—this variable holds a string of length BlockLen. The string is composed of letters from an input XTEN sequence and is determined by the position of the i counter, SubSeqList—this is a list that holds all of the generated subsequence scores.

[0114] FIG. 80 depicts the application of the algorithm SegScore to a hypothetical XTEN of 11 amino acids in order to determine the repetitiveness. An XTEN sequence (SEQ ID NO: 1177) consisting of N amino acids is divided into N-S+1 subsequences of length S (S=3 in this case). A pair-wise comparison of all subsequences is performed and the average number of identical subsequences is calculated to result, in this case, in a subsequence score of 1.89.

[0115] FIG. 81 provides the results of the assay to measure the fluorescence signal of RP11 clones pSD0107 to pSD0118), as described in Example 12. One positive control (pLCW970) and two negative controls (pBr322 and pLCW970+10 mM phosphate) were included. The GFP expression level was measured using samples from 2-3 shake flasks per construct.

[0116] FIGS. 82A-82F show the screening results of libraries LCW1157-1159. FIGS. 82A, 82B, and 82C provide the fluorescence histograms of LCW1157-1159, showing the number of colonies identified for each fluorescence signal region, as described in Example 12. The average fluorescence reading of the negative control (black arrow) and positive pSD0116 (white arrow) are marked in the figures. FIGS. 82D, 82E, and 82F provide the correlation between the fluorescence reading in the original test and the retest of the select clones.

[0117] FIG. 83 shows results of the SDS-PAGE analysis of the top 8 expression construct products and controls under unreduced conditions, as described in Example 12. The desired full length protein end product RP11-XTEN-GFP is indicated by an arrow, and the higher band is the dimer of the protein. Lanes: 1-8: top 8 expression constructs (expression level from high to low, based on fluorescence reading of the retests), 1. LCW1159.004, 2. LCW1159.006, 3. LCW1158.004, 4. LCW1157.040, 5. LCW1158.003, 6. LCW1157.039, 7. LCW1157.025, 8. LCW1157.038; C1-C3: Controls: C1. pSD0114, C2. pSD0116, C3. pCW1146 (Negative control).

[0118] FIG. 84 shows the SDS-PAGE evaluation of the MacroCap SP capture efficiency for the top 4 expression construct products under non-reducing conditions, as described in Example 12. Lanes 1-4: load, flow through, wash and elution of LCW1159.004, 2. Lanes 5-8: load, flow through, wash and elution of LCW1159.006. Lanes 9-12: load, flow through, wash and elution of LCW1158.004. 13-16: load, flow through, wash and elution of LCW1157.040. Lanes 17-20 1-4: load, flow through, wash and elution of negative control. Unmarked lanes are molecular weight standards.

[0119] FIG. 85 shows the summary of library LCW1163 screening results with a comparison of the fluorescence signal of the top 4 expression products and the controls in the retests, as described in Example 12. Each sample had 4 replicates, represented by 4 individual dots in the figure.

[0120] FIG. 86 shows the summary of library LCW1160 screening results, as described in Example 12. Fluorescence histogram of LCW1157-1159, showing the number of colonies identified for each fluorescence signal region; average fluorescence reading of negative control (black arrow), pSD0116 (white arrow), and LCW1159.004 (high expression candidates from screening LCW1157-1159, grey arrow) were marked in the figures.

[0121] FIGS. 87A-87B show 4-12% SDS-PAGE/silver staining analysis of MacroCap Q fractions as described in Example 14. FIG. 87A: Batch 2, lane 1: molecular weight standard; lanes 2-5: MacroCap Q flow through fractions 1-4, respectively; lanes 6-16: MacroCap Q elution fractions 1-11, respectively. FIG. 87B: Batch 1, lane 1: molecular weight standard; lanes 2-6: MacroCap Q flow through fractions 1-5, respectively; lanes 7-16: MacroCap Q elution fractions 1-10, respectively.

[0122] FIGS. 88A, 88B, 88C, 88D, and 88E show results from the analyses of intermediates and final product during the preparation of 1×DBCO, 3×LHRH-XTEN, as described in Example 34.

[0123] FIGS. 89A-89C show results of analyses of reaction mixtures from the preparation of conjugates to 1× Azide,3×MMAE-XTEN analyzed by C18-RP-HPLC and mass spectroscopy, as described in Example 35. FIG. 89A is analysis of the initial 1× Amino,3× Thiol-XTEN reactant. FIG. 89B is analysis of the protein modification with MMAE-Maleimide, showing the mass increase corresponding to modifications of three cysteines with MMAE-Mal. FIG. 89C shows the analysis of the protein modification with Azide-PEG4-NHS ester, with mass increases corresponding to the single addition of the azide-PEG4 moiety.

[0124] FIGS. 90A-90B show analyses of the reaction products in conjugates of 3×LHRH,3×MMAE-XTEN as described in Example 36. FIG. 90A: SDS-PAGE analysis of the click conjugate. 0.5 μg of proteins were loaded per lane on 12% Bis-Tris NuPAGE mini gel (Life Technologies). The gel was stained with Pierce Silver Stain Kit (Thermo Scientific, cat. #24612). Lane 1, 1× Azide,3×MMAE-XTEN; lane 2, 1×DBCO,3×LHRH-XTEN; lane 3, products of click chemistry reaction. The conjugation product band is indicated by the arrow. FIG. 90B: C4 RP-HPLC analysis of the click conjugate reactants and products—(1) 1×DBCO,3×LHRH-XTEN; (2) 1× Azide,3×MMAE-XTEN; (3) products of click chemistry reaction.

[0125] FIGS. 91A-91F show a flow chart of the reaction during preparation of conjugates of 1×LHRH,3×MMAE-XTEN, as described in Example 37. FIG. 91A: initial 1× Amino,3× Thiol-XTEN; FIG. 91B: protein modification with 2,2′-Dipyridyl disulfide; FIG. 91C: protein modification with DBCO-sulfo-NHS; FIG. 91D: deprotection of cysteines with TCEP; FIG. 91E: Modification of three cysteines with MMAE-Mal; FIG. 91F: Conjugation of LHRH-azide to N-terminal DBCO.

[0126] FIGS. 92A-92C show a flow chart of the reaction during preparation of conjugates of 1× Mal,3×PTX-XTEN reactant, as described in Example 41. FIG. 92A: Initial 1× Amino,3× Thiol-XTEN; FIG. 92B: Protein modification with PTX-Mal; FIG. 92C: Protein modification with Sulfo-SMCC.

[0127] FIGS. 93A-93C show results of analyses of reaction mixtures from the preparation of iodoacetyl-XTEN, as described in Example 42. FIG. 93A: 1× Amino-XTEN analyzed by C18-RP-HPLC before and after incubation with 10× excess of SIA. FIG. 93B: ESI-MS analysis of 1× Amino-XTEN modified with SIA. FIG. 93C: Samples analyzed by C18 RP-HPLC-Bottom profile—HCKFWW (SEQ ID NO: 25) peptide. Medium profile—IA-XTEN. Upper profile-reaction of IA-XTEN with 5× excess of HCKFWW (SEQ ID NO: 25) peptide.

[0128] FIGS. 94A-94D show the results of screening libraries LCW1171, 1172, 1203, and 1204, as described in Example 14. FIG. 94A-D: Fluorescence histogram of LCW1171, 1172, 1203, 1204, showing the number of colonies identified for each fluorescence signal region; average fluorescence reading of negative control (black arrow) and pSD0116 (white arrow) when screening LCW1171-1172 were marked in the FIGS. 94A and 94B; average fluorescence reading of negative control (black arrow), pSD0116 (white arrow), and CBD control (grey arrow) when screening LCW1203-1204 are marked in FIGS. 94C and 94D.

[0129] FIGS. 95A, 95B, and 95C show the results of screening libraries LCW1208-1210, as described in Example 12. FIGS. 95A-95C: Fluorescence histograms of LCW1208-1210, showing the number of colonies identified for each fluorescence signal region; average fluorescence reading of negative control (black arrow) and CBD control (grey arrow) are marked in the figures.

[0130] FIGS. 96A and 96B illustrated the production of XTEN segments from a precursor that contains three repeat copies of XTEN of identical length and sequence. In FIG. % A, the XTEN precursor comprises three identical copies of XTEN that are flanked by identical protease cleavage sites. In FIG. 96B, the XTEN precursor further comprises N- and C-terminal affinity purification tags to facilitate purification of full-length precursor molecules. Following purification of the precursor it is cleaved by protease that acts on all the incorporated cleavage sequences to release the tags from the XTEN, which is followed by purification to separate the individual units of XTEN, facilitating the high-yield production of XTENs with short and intermediate lengths from long-chain precursor molecules.

[0131] FIGS. 97A-97G illustrate different embodiments of trimeric, branched XTEN-payload conjugates in which all conjugates shown can be prepared from the identical XTEN molecules via conjugation to its N-terminal amino group and a functional group, such as the thiol of cysteine, that is located close to the C-terminus. FIGS. 97A and 97B illustrates conjugates having a single payload molecule, with FIG. 97A using a 4-arm cross-linker with all the XTEN conjugated in close proximity to the payload, resulting in significant shielding of payload interactions with other molecules. FIG. 97B illustrates a configuration in where the payload is conjugated to a single XTEN arm that is branched at the distal end of the configuration, resulting in reduced payload shielding compared to the configuration of FIG. 97A. FIG. 97C illustrates a conjugate with two payloads that can result in increased avidity or increased potency. FIGS. 97D and 97E illustrate configurations with three identical payloads to further increase potency and/or avidity. FIG. 97F illustrates a configuration with one payload A and two identical copies of payload B for high-avidity binding or interactions. FIG. 97G illustrates a configuration with 3 different payloads enabling the inclusion of three different functions into a single XTEN conjugate.

[0132] FIG. 98 illustrates a scheme for synthesis of a conjugate between a branched XTEN and a single payload molecule. Initially, the thiol group in XTEN is blocked by reaction with iodoacetamide (alternatively, one can start the synthesis using XTEN which lacks a thiol group). Next, a DBCO group is added to the alpha-amino group of XTEN, then is reacted with a tetrafunctional cross linker that comprises one iodoacetyl group and three azide groups. The resulting XTEN is next reacted with a payload that carries a free thiol group resulting in the final XTEN-payload conjugate.

[0133] FIG. 99 illustrates a scheme for synthesis of a conjugate between a branched XTEN and a single payload molecule. An intermediate is produced by reacting XTEN with a trifunctional linker comprising two azide functions and an NHS function followed by the addition of payload A to the thiol group via maleimide chemistry (the order of these two steps can be inverted). A second intermediate is produce by reacting XTEN with a cysteine with iodoacetamide to block the free thiol group followed by addition of DBCO to the alpha-amino group via NHS activation (the order of these two steps can be inverted). Subsequently, the two intermediate molecules are conjugated using a click chemistry reaction, resulting in the final XTEN-payload conjugate.

[0134] FIG. 100 illustrates a scheme for synthesis of a conjugate having a branched XTEN and two identical payload molecules. An intermediate is produced by adding a DBCO group to the alpha-amino group of an XTEN via NHS chemistry. A second intermediate is produced by blocking the free thiol group of an XTEN with iodoacetamide followed by addition of a trifunctional cross-linker (2 N-maleimide groups and a carboxyl group that is activated by NHS) to the alpha amino-group (the order of these two steps can be inverted). The two intermediates are reacted resulting in the branched conjugate, and then two payload A molecules are added via click chemistry reaction resulting in the final product XTEN-payload conjugate.

[0135] FIG. 101 illustrates a scheme for synthesis of a conjugate having a branched XTEN and three identical payload molecules. An intermediate is produced by adding a DBCO group to the alpha-amino group of an XTEN via NHS chemistry. Another intermediate is produced by conjugating payload A to the thiol group of an XTEN via a N-maleimide functional group. The three molecules are linked together via a trifunctional cross-linker comprising three azide functions, resulting in the final XTEN-payload conjugate.

[0136] FIG. 102 illustrates a scheme for synthesis of a conjugate having a branched XTEN and three identical payload molecules. An intermediate is produced by adding a DBCO group to the thiol group of an XTEN A via N-maleimide chemistry. In the next step, payload A is conjugated to the alpha amino-group of the XTEN intermediate via NHS chemistry. Three molecules of the resulting XTEN are linked via a trifunctional cross-linker comprising three azide functions, resulting in the final XTEN-payload conjugate.

[0137] FIG. 103 illustrates a scheme for synthesis of a conjugate having a branched XTEN and two Payload A and one Payload B molecules per conjugate. An intermediate is produced by adding Payload A to the thiol group of an XTEN using an N-maleimide functional group, followed by the addition of a trifunctional cross linker (two azide groups and a carboxyl group that is activated by NHS) to the alpha amino-group (the order of these two steps can be inverted). A second intermediate is produced by adding DBCO to the alpha amino-group of an XTEN via NHS activation followed by the addition of Payload B to the free thiol group of the XTEN using an N-maleimide group (the order of these two steps can be inverted). Two molecules of the second intermediate are reacted with one molecule of the first intermediate to form the final XTEN-payload conjugate.

[0138] FIG. 104 illustrates a scheme for synthesis of a conjugate having a branched XTEN and three different payloads. An intermediate is produced by adding Payload A to the thiol group on an XTEN using an N-maleimide functional group followed by the addition of a trifunctional cross linker (one azide group, one N-maleimide group and one carboxyl group that is activated by NHS) to the alpha amino-group (the order of these two steps can be inverted). A second intermediate is produced by adding Payload B to the alpha amino-group of XTEN via NHS chemistry. A third intermediate is produced by adding DBCO to the alpha amino-group of an XTEN via NHS activation followed by the addition of payload C to the free thiol group of the XTEN using an N-maleimide group (the order of these two steps can be inverted). The three intermediates are reacted with each other to form the final XTEN-payload conjugate.

[0139] FIG. 105 illustrates a scheme for synthesis of a conjugate having a dimeric or tetrameric branched XTEN and Payload A molecules. An intermediate is produced by adding DBCO to the thiol group of an XTEN using N-maleimide functional group followed by the addition Payload A to the amino group of the XTEN using NHS (the order of these two steps can be inverted). Subsequently the intermediate is multimerized by addition of azide cross-linkers. Use of a divalent cross-linker yields the dimeric configuration, and a tetravalent cross-linker yields the tetrameric configuration of the final product.

[0140] FIG. 106 illustrates a scheme for synthesis of a conjugate having a branched XTEN and three different payloads. An intermediate is produced by adding Payload A to the thiol group of an XTEN using N-maleimide functional group, followed by the addition of a trifunctional cross linker (one azide group, one N-maleimide group and one carboxyl group that is activated by NHS) to the alpha amino-group (the order of these two steps can be inverted). A second intermediate is produced by adding Payload B to the free thiol group of an XTEN via an N-maleimide functional group. A third intermediate is produced by adding DBCO to the alpha amino-group of an XTEN via NHS activation followed by the addition of Payload C to the free thiol group using a N-maleimide group (the order of these two steps can be inverted). The three intermediates are reacted with each other to form the final XTEN-payload conjugate.

[0141] FIGS. 107A-107C shows results of analyses of reaction mixtures from the preparation of conjugates to 1×DBCO,3×FA(γ)-XTEN analyzed by C18-RP-HPLC and mass spectroscopy, as described in Example 38. FIG. 107A is analysis of the initial 1× Amino,3× Thiol-XTEN reactant. FIG. 107B is analysis of the protein modification with Folate-gamma-Maleimide, showing the mass increase corresponding to modifications of three cysteines with FA(γ)-Mal. FIG. 107C shows the analysis of the protein modification with DBCO-sulfo-NHS ester, with mass increases corresponding to the single addition of the DBCO moiety.

[0142] FIG. 108 shows C4 RP-HPLC analyses of the click conjugate reactants and product 3×FA(γ),3×MMAE-XTEN, as described in Example 39. (1) 1×DBCO,3×FA(γ)-XTEN; (2) 1× Azide,3×MMAE-XTEN; (3) products of click chemistry reaction.

[0143] FIGS. 109A-109C show analyses of final 3×FA(γ),3×MMAE-XTEN product purified by preparative RP-HPLC, as described in Example 39. FIG. 109A shows size exclusion chromatography analysis (Phenomenex BioSep-SEC-s4000 600×7.80 mm column, 50 mM Sodium Phosphate pH 6.5, 300 mM NaCl buffer, flow rate 0.5 ml/min, isocratic elution 70 min). FIG. 109B shows RP-HPLC analysis (Phenomenex Jupiter C18 5 μM 300 A 150×4.60 mm column, Buffer A: 0.1% TFA in H2O, Buffer B: 0.1% TFA in CAN, flow rate 1 ml/min, gradient 5% to 50% B in 45 min). FIG. 109C shows ESI-MS analysis (QSTAR-XL, calculated MW 85,085.4 Da, experimental MW 85,091 Da).

[0144] FIG. 110 shows the results of GPCR Ca²⁺ mobilization activity of recombinant GLP2-2G-XTEN (filled squares) and conjugate GLP2-2G-XTEN (filled circles), performed as described in Example 62.

[0145] FIG. 111 shows the results of an in vitro human plasma stability of recombinant GLP2-2G-XTEN (filled squares) and conjugate GLP2-2G-XTEN (filled triangles) at various time points at 37° C., performed as described in Example 63.

[0146] FIG. 112 shows the results of the pharmacokinetic profile of recombinant GLP2-2G-XTEN (filled squares) and conjugate GLP2-2G-XTEN (filled triangles) in rats, performed as described in Example 64.

[0147] FIGS. 113A-113D. FIG. 113A shows the SEC-HPLC analysis of the reaction products between Tris-[2-maleimidoethyl]amine and 1× Amino,1× Thiol-XTEN432: FIG. 113A-conjugation mixture: peak 1—trimeric XTEN, peak 2—dimeric XTEN, peak 3—unreacted monomeric XTEN; FIG. 113B—linear XTEN_1296 control; FIG. 113C—linear XTEN_864 control; FIG. 113D—linear XTEN_432 control.

[0148] FIGS. 114A-114B. FIG. 114A shows the C18 RP-HPLC analysis of DBCO-sulfo-NHS conjugation to 1× Amino-XTEN_288, as described in Example 65. Unreacted XTEN eluted at 19 min. 1×DBCO-XTEN_288 eluted at 27 min. DBCO-sulfo-NHS reagent and product of its hydrolysis eluted at 41.5 min and 38.5 min, respectively. FIG. 114B shows C18 RP-HPLC analysis of Azido-PEG4-NHS ester conjugation to Tris(2-aminoethyl)amine. 3× Azide-PEG4-TAEA was identified by MALDI-TOF MS and ESI-MS as a product with MW of 966 Da.

[0149] FIG. 115 shows the SEC-HPLC analysis, as described in Example 66, of the reaction products between 3× Azide-PEG4-TAEA and 1×DBCO-XTEN_288: (trace A) conjugation mixture: peak 1—trimeric XTEN, peak 2—dimeric XTEN, peak 3—unreacted monomeric XTEN, peak 4—low molecular weight compounds; (trace B) linear XTEN_864 control; (trace C) linear XTEN576 control; (trace D) linear XTEN_288 control.

[0150] FIG. 116 shows results of a killing assay demonstrating selective cytotoxicity of 3×FA(γ),3×MMAE-XTEN on KB cells, as described in Example 69. The inhibitory dose response curves are shown for the groups of free MMAE (filled circles); 3×MMAE-XTEN (filled, inverted triangles) and 3×FA(γ),3×MMAE-XTEN in the presence (filled triangles) and absence (filled squares) of folic acid competitor on KB cells.

[0151] FIGS. 117A-117C shows the structure of the XTEN-payload conjugate 3×FA(γ),3×MMAE-XTEN. FIG. 117A shows the two XTEN (SEQ ID NOS 1178-1179, respectively, in order of appearance) linked by the reaction of the azide 1-azido-3,6,9,12-tetraoxapentadecan-15-oic acid, N-hydroxysuccinimide ester and the alkyne 6-(11,12-didehydrodibenzo[b,f]azocin-5(6H)-yl)-6-oxohexanoic acid, N-hydroxysuccinimide (or N-hydroxysulfosuccinimide) ester. FIG. 117B shows the X residue of Cys modified with folate-γ-aminopentyl-maleimide. FIG. 117C shows the Z residue of Cys modified with maleimidocaproyl-valine-citrulline-p-aminobenzyloxycarbonyl-monomethylauristatin E.

### DETAILED DESCRIPTION

[0152] Before the embodiments of the invention are described, it is to be understood that such embodiments are provided by way of example only, and that various alternatives to the embodiments of the invention described herein may be employed in practicing the invention. Numerous variations, changes, and substitutions will now occur to those skilled in the art without departing from the invention.

[0153] Unless otherwise defined, all technical and scientific terms used herein have the same meaning as commonly understood by one of ordinary skill in the art to which this invention belongs. Although methods and materials similar or equivalent to those described herein can be used in the practice or testing of the present invention, suitable methods and materials are described below. In case of conflict, the patent specification, including definitions, will control. In addition, the materials, methods, and examples are illustrative only and not intended to be limiting. Numerous variations, changes, and substitutions will now occur to those skilled in the art without departing from the invention.

### Definitions

[0154] In the context of the present application, the following terms have the meanings ascribed to them unless specified otherwise:

[0155] As used throughout the specification and claims, the terms “a”, “an” and “the” are used in the sense that they mean “at least one”, “at least a first”, “one or more” or “a plurality” of the referenced components or steps, except in instances wherein an upper limit is thereafter specifically stated. Therefore, a “payload”, as used herein, means “at least a first payload” but includes a plurality of payloads. The operable limits and parameters of combinations, as with the amounts of any single agent, will be known to those of ordinary skill in the art in light of the present disclosure.

[0156] The terms “polypeptide”, “peptide”, and “protein” are used interchangeably herein to refer to polymers of amino acids of any length. The polymer may be linear or branched, it may comprise modified amino acids, and it may be interrupted by non-amino acids. The terms also encompass an amino acid polymer that has been modified, for example, by disulfide bond formation, glycosylation, lipidation, acetylation, phosphorylation, or any other manipulation, such as conjugation with a labeling component.

[0157] As used herein, the term “amino acid” refers to either natural and/or unnatural or synthetic amino acids, including but not limited to both the D or L optical isomers, and amino acid analogs and peptidomimetics. Standard single or three letter codes are used to designate amino acids.

[0158] A “pharmacologically active” agent includes any drug, compound, composition of matter or mixture desired to be delivered to a subject, e.g. therapeutic agents, diagnostic agents, or drug delivery agents, which provides or is expected to provide some pharmacologic, often beneficial, effect that can be demonstrated in vivo or in vitro. Such agents may include peptides, proteins, carbohydrates, nucleic acids, nucleosides, oligonucleotides, and small molecule synthetic compounds, or analogs thereof.

[0159] The term “natural L-amino acid” means the L optical isomer forms of glycine (G), proline (P), alanine (A), valine (V), leucine (L), isoleucine (I), methionine (M), cysteine (C), phenylalanine (F), tyrosine (Y), tryptophan (W), histidine (H), lysine (K), arginine (R), glutamine (Q), asparagine (N), glutamic acid (E), aspartic acid (D), serine (S), and threonine (T).

[0160] The term “non-naturally occurring,” as applied to sequences and as used herein, means polypeptide or polynucleotide sequences that do not have a counterpart to, are not complementary to, or do not have a high degree of homology with a wild-type or naturally-occurring sequence found in a mammal. For example, a non-naturally occurring polypeptide or fragment may share no more than 99%, 98%, 95%, 90%, 80%, 70%, 60%, 50% or even less amino acid sequence identity as compared to a natural sequence when suitably aligned.

[0161] The terms “hydrophilic” and “hydrophobic” refer to the degree of affinity that a substance has with water. A hydrophilic substance has a strong affinity for water, tending to dissolve in, mix with, or be wetted by water, while a hydrophobic substance substantially lacks affinity for water, tending to repel and not absorb water and tending not to dissolve in or mix with or be wetted by water. Amino acids can be characterized based on their hydrophobicity. A number of scales have been developed. An example is a scale developed by Levitt, M, et al., J Mol Biol (1976) 104:59, which is listed in Hopp, T P, et al., Proc Natl Acad Sci USA (1981) 78:3824. Examples of “hydrophilic amino acids” are arginine, lysine, threonine, alanine, asparagine, and glutamine. Of particular interest are the hydrophilic amino acids aspartate, glutamate, and serine, and glycine. Examples of “hydrophobic amino acids” are tryptophan, tyrosine, phenylalanine, methionine, leucine, isoleucine, and valine.

[0162] A “fragment” when applied to a biologically active protein, is a truncated form of a the biologically active protein that retains at least a portion of the therapeutic and/or biological activity. A “variant,” when applied to a biologically active protein is a protein with sequence homology to the native biologically active protein that retains at least a portion of the therapeutic and/or biological activity of the biologically active protein. For example, a variant protein may share at least 70%, 75%, 80%, 85%, 90%, 95%, 96%, 97%, 98% or 99% amino acid sequence identity compared with the reference biologically active protein. As used herein, the term “biologically active protein variant” includes proteins modified deliberately, as for example, by site directed mutagenesis, synthesis of the encoding gene, insertions, or accidentally through mutations and that retain activity.

[0163] The term “sequence variant” means polypeptides that have been modified compared to their native or original sequence by one or more amino acid insertions, deletions, or substitutions. Insertions may be located at either or both termini of the protein, and/or may be positioned within internal regions of the amino acid sequence. A non-limiting example is insertion of an XTEN sequence within the sequence of the biologically-active payload protein. Another non-limiting example is substitution of an amino acid in an XTEN with a different amino acid. In deletion variants, one or more amino acid residues in a polypeptide as described herein are removed. Deletion variants, therefore, include all fragments of a payload polypeptide sequence. In substitution variants, one or more amino acid residues of a polypeptide are removed and replaced with alternative residues. In one aspect, the substitutions are conservative in nature and conservative substitutions of this type are well known in the art.

[0164] The term “moiety” means a component of a larger composition or that is intended to be incorporated into a larger composition, such as a functional group of a drug molecule or a targeting peptide joined to a larger polypeptide.

[0165] As used herein, “terminal XTEN” refers to XTEN sequences that have been fused to or in the N- or C-terminus of the payload when the payload is a peptide or polypeptide.

[0166] The term “XTEN release site” refers to a cleavage sequence in XTEN-payload that can be recognized and cleaved by a protease, effecting release of an XTEN or a portion of an XTEN from the XTEN-payload polypeptide. As used herein, “mammalian protease” means a protease that normally exists in the body fluids, cells or tissues of a mammal. XTEN release sites can be engineered to be cleaved by various mammalian proteases (a.k.a. “XTEN release proteases”) such as trypsin, FXIa, FXIIa, kallikrein, FVIIIa, FVIIIa, FXa, FIIa (thrombin), Elastase-2, MMP-12, MMP13, MMP-17, MMP-20, or any protease that is present in a subject. Other equivalent proteases (endogenous or exogenous) that are capable of recognizing a defined cleavage site can be utilized. The cleavage sites can be adjusted and tailored to the protease utilized.

[0167] The term “within”, when referring to a first polypeptide being linked to a second polypeptide, encompasses linking that connects the N-terminus of the first or second polypeptide to the C-terminus of the second or first polypeptide, respectively, as well as insertion of the first polypeptide into the sequence of the second polypeptide. For example, when an XTEN is linked “within” a payload polypeptide, the XTEN may be linked to the N-terminus, the C-terminus, or may be inserted between any two amino acids of the payload polypeptide.

[0168] “Activity” as applied to form(s) of a XTEN-payload composition provided herein, refers to an action or effect, including but not limited to receptor binding, antagonist activity, agonist activity, a cellular or physiologic response, or an effect generally known in the art for the payload, whether measured by an in vitro, ex vivo or in vivo assay or a clinical effect.

[0169] As used herein, the term “ELISA” refers to an enzyme-linked immunosorbent assay as described herein or as otherwise known in the art.

[0170] A “host cell” includes an individual cell or cell culture which can be or has been a recipient for the subject vectors such as those described herein. Host cells include progeny of a single host cell. The progeny may not necessarily be completely identical (in morphology or in genomic of total DNA complement) to the original parent cell due to natural, accidental, or deliberate mutation. A host cell includes cells transfected in vivo with a vector of this invention.

[0171] “Isolated” when used to describe the various polypeptides disclosed herein, means polypeptide that has been identified and separated and/or recovered from a component of its natural environment. Contaminant components of its natural environment are materials that would typically interfere with diagnostic or therapeutic uses for the polypeptide, and may include enzymes, hormones, and other proteinaceous or non-proteinaceous solutes. As is apparent to those of skill in the art, a non-naturally occurring polynucleotide, peptide, polypeptide, protein, antibody, or fragments thereof, does not require “isolation” to distinguish it from its naturally occurring counterpart. In addition, a “concentrated”, “separated” or “diluted” polynucleotide, peptide, polypeptide, protein, antibody, or fragments thereof, is distinguishable from its naturally occurring counterpart in that the concentration or number of molecules per volume is generally greater than that of its naturally occurring counterpart. In general, a polypeptide made by recombinant means and expressed in a host cell is considered to be “isolated.”

[0172] An “isolated” nucleic acid is a nucleic acid molecule that is identified and separated from at least one contaminant nucleic acid molecule with which it is ordinarily associated in the natural source of the polypeptide-encoding nucleic acid. For example, an isolated polypeptide-encoding nucleic acid molecule is other than in the form or setting in which it is found in nature. Isolated polypeptide-encoding nucleic acid molecules therefore are distinguished from the specific polypeptide-encoding nucleic acid molecule as it exists in natural cells. However, an isolated polypeptide-encoding nucleic acid molecule includes polypeptide-encoding nucleic acid molecules contained in cells that ordinarily express the polypeptide where, for example, the nucleic acid molecule is in a chromosomal or extra-chromosomal location different from that of natural cells.

[0173] A “chimeric” protein contains at least one fusion polypeptide comprising at least one region in a different position in the sequence than that which occurs in nature. The regions may normally exist in separate proteins and are brought together in the fusion polypeptide; or they may normally exist in the same protein but are placed in a new arrangement in the fusion polypeptide. A chimeric protein may be created, for example, by chemical synthesis, or by creating and translating a polynucleotide in which the peptide regions are encoded in the desired relationship.

[0174] “Fused,” and “fusion” are used interchangeably herein, and refers to the joining together of two or more peptide or polypeptide sequences by recombinant means.

[0175] “Operably linked” means that the DNA sequences being linked are contiguous, and in reading phase or in-frame. An “in-frame fusion” refers to the joining of two or more open reading frames (ORFs) to form a continuous longer ORF, in a manner that maintains the correct reading frame of the original ORFs. For example, a promoter or enhancer is operably linked to a coding sequence for a polypeptide if it affects the transcription of the polypeptide sequence. Thus, the resulting recombinant fusion protein is a single protein containing two or more segments that correspond to polypeptides encoded by the original ORFs (which segments are not normally so joined in nature).

[0176] “Crosslinking,” “conjugating,” “link,” “linking” and “joined to” are used interchangeably herein, and refer to the covalent joining of two different molecules by a chemical reaction. The crosslinking can occur in one or more chemical reactions, as described more fully, below.

[0177] The term “conjugation partner” as used herein, refers to the individual components that can be linked or are linked in a conjugation reaction.

[0178] The term “conjugate” is intended to refer to the heterogeneous molecule formed as a result of covalent linking of conjugation partners one to another, e.g., a biologically active payload covalently linked to a XTEN molecule or a cross-linker covalently linked to a reactive XTEN.

[0179] “Cross-linker” and “linker” and “cross-linking agent” are used interchangeably and in their broadest context to mean a chemical entity used to covalently join two or more entities. For example, a cross-linker joins two, three, four or more XTEN, or joins a payload to an XTEN, as the entities are defined herein. A cross-linker includes, but is not limited to, the reaction product of small molecule zero-length, homo- or hetero-bifunctional, and multifunctional cross-linker compounds, the reaction product of two click-chemistry reactants. It will be understood by one of skill in the art that a cross-linker can refer to the covalently-bound reaction product remaining after the crosslinking of the reactants. The cross-linker can also comprise one or more reactants which have not yet reacted but which are capable to react with another entity.

[0180] In the context of polypeptides, a “linear sequence” or a “sequence” is an order of amino acids in a polypeptide in an amino to carboxyl terminus direction in which residues that neighbor each other in the sequence are contiguous in the primary structure of the polypeptide. A “partial sequence” is a linear sequence of part of a polypeptide that is known to comprise additional residues in one or both directions.

[0181] “Heterologous” means derived from a genotypically distinct entity from the rest of the entity to which it is being compared. For example, a glycine rich sequence removed from its native coding sequence and operatively linked to a coding sequence other than the native sequence is a heterologous glycine rich sequence. The term “heterologous” as applied to a polynucleotide, a polypeptide, means that the polynucleotide or polypeptide is derived from a genotypically distinct entity from that of the rest of the entity to which it is being compared.

[0182] The terms “polynucleotides”, “nucleic acids”, “nucleotides” and “oligonucleotides” are used interchangeably. They refer to a polymeric form of nucleotides of any length, either deoxyribonucleotides or ribonucleotides, or analogs thereof. Polynucleotides may have any three-dimensional structure, and may perform any function, known or unknown. The following are non-limiting examples of polynucleotides: coding or non-coding regions of a gene or gene fragment, loci (locus) defined from linkage analysis, exons, introns, messenger RNA (mRNA), transfer RNA, ribosomal RNA, ribozymes, cDNA, recombinant polynucleotides, branched polynucleotides, plasmids, vectors, isolated DNA of any sequence, isolated RNA of any sequence, nucleic acid probes, and primers. A polynucleotide may comprise modified nucleotides, such as methylated nucleotides and nucleotide analogs. If present, modifications to the nucleotide structure may be imparted before or after assembly of the polymer. The sequence of nucleotides may be interrupted by non-nucleotide components. A polynucleotide may be further modified after polymerization, such as by conjugation with a labeling component.

[0183] The term “complement of a polynucleotide” denotes a polynucleotide molecule having a complementary base sequence and reverse orientation as compared to a reference sequence, such that it could hybridize with a reference sequence with complete fidelity.

[0184] “Recombinant” as applied to a polynucleotide means that the polynucleotide is the product of various combinations of recombination steps which may include cloning, restriction and/or ligation steps, and other procedures that result in expression of a recombinant protein in a host cell.

[0185] The terms “gene” and “gene fragment” are used interchangeably herein. They refer to a polynucleotide containing at least one open reading frame that is capable of encoding a particular protein after being transcribed and translated. A gene or gene fragment may be genomic or cDNA, as long as the polynucleotide contains at least one open reading frame, which may cover the entire coding region or a segment thereof. A “fusion gene” is a gene composed of at least two heterologous polynucleotides that are linked together.

[0186] “Homology” or “homologous” or “sequence identity” refers to sequence similarity or interchangeability between two or more polynucleotide sequences or between two or more polypeptide sequences. When using a program such as BestFit to determine sequence identity, similarity or homology between two different amino acid sequences, the default settings may be used, or an appropriate scoring matrix, such as blosum45 or blosum80, may be selected to optimize identity, similarity or homology scores. Preferably, polynucleotides that are homologous are those which hybridize under stringent conditions as defined herein and have at least 70%, preferably at least 80%, more preferably at least 90%, more preferably 95%, more preferably 97%, more preferably 98%, and even more preferably 99% sequence identity compared to those sequences. Polypeptides that are homologous preferably have sequence identities that are at least 70%, preferably at least 80%, even more preferably at least 90%, even more preferably at least 95-99% identical.

[0187] “Ligation” as applied to polynucleic acids refers to the process of forming phosphodiester bonds between two nucleic acid fragments or genes, linking them together. To ligate the DNA fragments or genes together, the ends of the DNA must be compatible with each other. In some cases, the ends will be directly compatible after endonuclease digestion. However, it may be necessary to first convert the staggered ends commonly produced after endonuclease digestion to blunt ends to make them compatible for ligation.

[0188] The terms “stringent conditions” or “stringent hybridization conditions” includes reference to conditions under which a polynucleotide will hybridize to its target sequence, to a detectably greater degree than other sequences (e.g., at least 2-fold over background). Generally, stringency of hybridization is expressed, in part, with reference to the temperature and salt concentration under which the wash step is carried out. Typically, stringent conditions will be those in which the salt concentration is less than about 1.5 M Na ion, typically about 0.01 to 1.0 M Na ion concentration (or other salts) at pH 7.0 to 8.3 and the temperature is at least about 30° C. for short polynucleotides (e.g., 10 to 50 nucleotides) and at least about 60° C. for long polynucleotides (e.g., greater than 50 nucleotides)—for example, “stringent conditions” can include hybridization in 50% formamide, 1 M NaCl, 1% SDS at 37° C., and three washes for 15 min each in 0.1×SSC/1% SDS at 60° C. to 65° C. Alternatively, temperatures of about 65° C., 60° C., 55° C., or 42° C. may be used. SSC concentration may be varied from about 0.1 to 2×SSC, with SDS being present at about 0.1%. Such wash temperatures are typically selected to be about 5° C. to 20° C. lower than the thermal melting point for the specific sequence at a defined ionic strength and pH. The Tm is the temperature (under defined ionic strength and pH) at which 50% of the target sequence hybridizes to a perfectly matched probe. An equation for calculating Tm and conditions for nucleic acid hybridization are well known and can be found in Sambrook, J. et al., “Molecular Cloning: A Laboratory Manual,” 3^{rd} edition, Cold Spring Harbor Laboratory Press, 2001. Typically, blocking reagents are used to block non-specific hybridization. Such blocking reagents include, for instance, sheared and denatured salmon sperm DNA at about 100-200 μg/ml. Organic solvent, such as formamide at a concentration of about 35-50% v/v, may also be used under particular circumstances, such as for RNA:DNA hybridizations. Useful variations on these wash conditions will be readily apparent to those of ordinary skill in the art.

[0189] The terms “percent identity,” percentage of sequence identity,” and “% identity,” as applied to polynucleotide sequences, refer to the percentage of residue matches between at least two polynucleotide sequences aligned using a standardized algorithm. Such an algorithm may insert, in a standardized and reproducible way, gaps in the sequences being compared in order to optimize alignment between two sequences, and therefore achieve a more meaningful comparison of the two sequences. Percent identity may be measured over the length of an entire defined polynucleotide sequence, or may be measured over a shorter length, for example, over the length of a fragment taken from a larger, defined polynucleotide sequence, for instance, a fragment of at least 45, at least 60, at least 90, at least 120, at least 150, at least 210 or at least 450 contiguous residues. Such lengths are exemplary only, and it is understood that any fragment length supported by the sequences shown herein, in the tables, figures or Sequence Listing, may be used to describe a length over which percentage identity may be measured. The percentage of sequence identity is calculated by comparing two optimally aligned sequences over the window of comparison, determining the number of matched positions (at which identical residues occur in both polypeptide sequences), dividing the number of matched positions by the total number of positions in the window of comparison (i.e., the window size), and multiplying the result by 100 to yield the percentage of sequence identity. When sequences of different length are to be compared, the shortest sequence defines the length of the window of comparison. Conservative substitutions are not considered when calculating sequence identity.

[0190] “Percent (%) sequence identity,” with respect to the polypeptide sequences identified herein, is defined as the percentage of amino acid residues in a query sequence that are identical with the amino acid residues of a second, reference polypeptide sequence or a portion thereof, after aligning the sequences and introducing gaps, if necessary, to achieve the maximum percent sequence identity, and not considering any conservative substitutions as part of the sequence identity, thereby resulting in optimal alignment. Alignment for purposes of determining percent amino acid sequence identity can be achieved in various ways that are within the skill in the art, for instance, using publicly available computer software such as BLAST, BLAST-2, ALIGN or Megalign (DNASTAR) software. Those skilled in the art can determine appropriate parameters for measuring alignment, including any algorithms needed to achieve optimal alignment over the full length of the sequences being compared. Percent identity may be measured over the length of an entire defined polypeptide sequence, or may be measured over a shorter length, for example, over the length of a fragment taken from a larger, defined polypeptide sequence, for instance, a fragment of at least 15, at least 20, at least 30, at least 40, at least 50, at least 70 or at least 150 contiguous residues. Such lengths are exemplary only, and it is understood that any fragment length supported by the sequences shown herein, in the tables, figures or Sequence Listing, may be used to describe a length over which percentage identity may be measured.

[0191] “Repetitiveness” used in the context of polynucleotide sequences refers to the degree of internal homology in the sequence such as, for example, the frequency of identical nucleotide sequences of a given length. Repetitiveness can, for example, be measured by analyzing the frequency of identical sequences.

[0192] A “vector” is a nucleic acid molecule, preferably self-replicating in an appropriate host, which transfers an inserted nucleic acid molecule into and/or between host cells. The term includes vectors that function primarily for insertion of DNA or RNA into a cell, replication of vectors that function primarily for the replication of DNA or RNA, and expression vectors that function for transcription and/or translation of the DNA or RNA. Also included are vectors that provide more than one of the above functions. An “expression vector” is a polynucleotide which, when introduced into an appropriate host cell, can be transcribed and translated into a polypeptide(s). An “expression system” usually connotes a suitable host cell comprised of an expression vector that can function to yield a desired expression product.

[0193] “Serum degradation resistance,” as applied to a polypeptide, refers to the ability of the polypeptides to withstand degradation in blood or components thereof, which typically involves proteases in the serum or plasma. The serum degradation resistance can be measured by combining the protein with human (or mouse, rat, monkey, as appropriate) serum or plasma, typically for a range of days (e.g. 0.25, 0.5, 1, 2, 4, 8, 16 days), typically at about 37° C. The samples for these time points can be run on a Western blot assay and the protein is detected with an antibody. The antibody can be to a tag in the protein. If the protein shows a single band on the western, where the protein's size is identical to that of the injected protein, then no degradation has occurred. In this exemplary method, the time point where 50% of the protein is degraded, as judged by Western blots or equivalent techniques, is the serum degradation half-life or “serum half-life” of the protein.

[0194] The terms “t_{1/2}”, “half-life”, “terminal half-life”, “elimination half-life” and “circulating half-life” are used interchangeably herein and, as used herein means the terminal half-life calculated as ln(2)/Kₑₗ. Kₑₗ is the terminal elimination rate constant calculated by linear regression of the terminal linear portion of the log concentration vs. time curve. Half-life typically refers to the time required for half the quantity of an administered substance deposited in a living organism to be metabolized or eliminated by normal biological processes.

[0195] “Active clearance” means the mechanisms by which a protein is removed from the circulation other than by filtration, and which includes removal from the circulation mediated by cells, receptors, metabolism, or degradation of the protein.

[0196] “Apparent molecular weight factor” and “apparent molecular weight” are related terms referring to a measure of the relative increase or decrease in apparent molecular weight exhibited by a particular amino acid or polypeptide sequence. The apparent molecular weight is determined using size exclusion chromatography (SEC) or similar methods by comparing to globular protein standards, and is measured in “apparent kD” units. The apparent molecular weight factor is the ratio between the apparent molecular weight and the actual molecular weight; the latter predicted by adding, based on amino acid composition, the calculated molecular weight of each type of amino acid in the composition or by estimation from comparison to molecular weight standards in an SDS electrophoresis gel. Determination of both the apparent molecular weight and apparent molecular weight factor for representative proteins is described in the Examples.

[0197] The terms “hydrodynamic radius” or “Stokes radius” is the effective radius (Rₕ in nm) of a molecule in a solution measured by assuming that it is a body moving through the solution and resisted by the solution's viscosity. In the embodiments of the invention, the hydrodynamic radius measurements of the XTEN polypeptides correlate with the “apparent molecular weight factor” which is a more intuitive measure. The “hydrodynamic radius” of a protein affects its rate of diffusion in aqueous solution as well as its ability to migrate in gels of macromolecules. The hydrodynamic radius of a protein is determined by its molecular weight as well as by its structure, including shape and compactness. Methods for determining the hydrodynamic radius are well known in the art, such as by the use of size exclusion chromatography (SEC), as described in U.S. Pat. Nos. 6,406,632 and 7,294,513. Most proteins have globular structure, which is the most compact three-dimensional structure a protein can have with the smallest hydrodynamic radius. Some proteins adopt a random and open, unstructured, or ‘linear’ conformation and as a result have a much larger hydrodynamic radius compared to typical globular proteins of similar molecular weight.

[0198] “Physiological conditions” refers to a set of conditions in a living host as well as in vitro conditions, including temperature, salt concentration, pH, that mimic those conditions of a living subject. A host of physiologically relevant conditions for use in in vitro assays have been established. Generally, a physiological buffer contains a physiological concentration of salt and is adjusted to a neutral pH ranging from about 6.5 to about 7.8, and preferably from about 7.0 to about 7.5. A variety of physiological buffers are listed in Sambrook et al. (2001). Physiologically relevant temperature ranges from about 25° C. to about 38° C., and preferably from about 35° C. to about 37° C.

[0199] A “single atom residue of a payload” means the atom of a payload that is chemically linked to XTEN after reaction with the subject XTEN or XTEN-linker compositions; typically a sulfur, an oxygen, a nitrogen, or a carbon atom. For example, an atom residue of a payload could be a sulfur residue of a cysteine thiol reactive group in a payload, a nitrogen molecule of an amino reactive group of a peptide or polypeptide or small molecule payload, a carbon or oxygen residue or a reactive carboxyl or aldehyde group of a peptide, protein or a small molecule or synthetic, organic drug.

[0200] A “reactive group” is a chemical structure that can be coupled to a second reactive group. Examples of reactive groups are amino groups, carboxyl groups, sulfhydryl groups, hydroxyl groups, aldehyde groups, azide groups. Some reactive groups can be activated to facilitate conjugation with a second reactive group, either directly or through a cross-linker. As used herein, a reactive group can be a part of an XTEN, a cross-linker, an azide/alkyne click-chemistry reactant, or a payload so long as it has the ability to participate in a chemical reaction. Once reacted, a conjugation bond links the residues of the payload or cross-linker or XTEN reactants.

[0201] “Controlled release agent”, “slow release agent”, “depot formulation” and “sustained release agent” are used interchangeably to refer to an agent capable of extending the duration of release of a polypeptide of the invention relative to the duration of release when the polypeptide is administered in the absence of agent. Different embodiments of the present invention may have different release rates, resulting in different therapeutic amounts.

[0202] The term “payload” as used herein refers to any protein, peptide sequence, small molecule, drug or composition of matter that has a biological, pharmacological or therapeutic activity or beneficial effect when administered in a subject or that can be demonstrated in vitro. Payload also includes a molecule that can be used for imaging or in vivo diagnostic purposes. Examples of payloads include, but are not limited to, cytokines, enzymes, hormones, blood coagulation factors, and growth factors, chemotherapeutic agents, antiviral compounds, toxins, anti-cancer drugs, radioactive compounds, and contrast agents, as well as targeting peptides, proteins, antibodies, antibody fragments, or compounds used to bind to receptors or ligands.

[0203] The terms “antigen”, “target antigen” and “immunogen” are used interchangeably herein to refer to the structure or binding determinant that an antibody fragment or an antibody fragment-based therapeutic binds to or has specificity against.

[0204] The term “antagonist”, as used herein, includes any molecule that partially or fully blocks, inhibits, or neutralizes a biological activity of a native polypeptide disclosed herein. Methods for identifying antagonists of a polypeptide may comprise contacting a native polypeptide with a candidate antagonist molecule and measuring a detectable change in one or more biological activities normally associated with the native polypeptide. In the context of the present invention, antagonists may include proteins, nucleic acids, carbohydrates, antibodies or any other molecules that decrease the effect of a biologically active protein.

[0205] A “defined medium” refers to a medium comprising nutritional and hormonal requirements necessary for the survival and/or growth of the cells in culture such that the components of the medium are known. Traditionally, the defined medium has been formulated by the addition of nutritional and growth factors necessary for growth and/or survival. Typically, the defined medium provides at least one component from one or more of the following categories: a) all essential amino acids, and usually the basic set of twenty amino acids plus cysteine; b) an energy source, usually in the form of a carbohydrate such as glucose; c) vitamins and/or other organic compounds required at low concentrations; d) free fatty acids; and e) trace elements, where trace elements are defined as inorganic compounds or naturally occurring elements that are typically required at very low concentrations, usually in the micromolar range. The defined medium may also optionally be supplemented with one or more components from any of the following categories: a) one or more mitogenic agents; b) salts and buffers as, for example, calcium, magnesium, and phosphate; c) nucleosides and bases such as, for example, adenosine and thymidine, hypoxanthine; and d) protein and tissue hydrolysates.

[0206] The term “agonist” is used in the broadest sense and includes any molecule that mimics a biological activity of a native polypeptide disclosed herein. Suitable agonist molecules specifically include agonist antibodies or antibody fragments, fragments or amino acid sequence variants of native polypeptides, peptides, small organic molecules, etc. Methods for identifying agonists of a native polypeptide may comprise contacting a native polypeptide with a candidate agonist molecule and measuring a detectable change in one or more biological activities normally associated with the native polypeptide.

[0207] “Inhibition constant”, or “Ki”, are used interchangeably and mean the dissociation constant of the enzyme-inhibitor complex, or the reciprocal of the binding affinity of the inhibitor to the enzyme.

[0208] As used herein, “treat” or “treating,” or “palliating” or “ameliorating” are used interchangeably and mean administering a drug or a biologic to achieve a therapeutic benefit, to cure or reduce the severity of an existing condition, or to achieve a prophylactic benefit, prevent or reduce the likelihood of onset or severity the occurrence of a condition. By therapeutic benefit is meant eradication or amelioration of the underlying condition being treated or one or more of the physiological symptoms associated with the underlying condition such that an improvement is observed in the subject, notwithstanding that the subject may still be afflicted with the underlying condition.

[0209] A “therapeutic effect” or “therapeutic benefit,” as used herein, refers to a physiologic effect, including but not limited to the mitigation, amelioration, or prevention of disease in humans or other animals, or to otherwise enhance physical or mental wellbeing of humans or animals, resulting from administration of a polypeptide of the invention other than the ability to induce the production of an antibody against an antigenic epitope possessed by the biologically active protein. For prophylactic benefit, the compositions may be administered to a subject at risk of developing a particular disease, condition or symptom of the disease (e.g., a bleed in a diagnosed hemophilia A subject), or to a subject reporting one or more of the physiological symptoms of a disease, even though a diagnosis of this disease may not have been made.

[0210] The terms “therapeutically effective amount” and “therapeutically effective dose”, as used herein, refer to an amount of a drug or a biologically active protein, either alone or as a part of a polypeptide composition, that is capable of having any detectable, beneficial effect on any symptom, aspect, measured parameter or characteristics of a disease state or condition when administered in one or repeated doses to a subject. Such effect need not be absolute to be beneficial. Determination of a therapeutically effective amount is well within the capability of those skilled in the art, especially in light of the detailed disclosure provided herein.

[0211] The term “therapeutically effective dose regimen”, as used herein, refers to a schedule for consecutively administered multiple doses (i.e., at least two or more) of a biologically active protein, either alone or as a part of a polypeptide composition, wherein the doses are given in therapeutically effective amounts to result in sustained beneficial effect on any symptom, aspect, measured parameter or characteristics of a disease state or condition.

### I). General Techniques

[0212] The practice of the present invention employs, unless otherwise indicated, conventional techniques of immunology, biochemistry, chemistry, molecular biology, microbiology, cell biology, genomics and recombinant DNA, which are within the skill of the art. See Sambrook, J. et al., “Molecular Cloning: A Laboratory Manual,” 3^{rd} edition, Cold Spring Harbor Laboratory Press, 2001; “Current protocols in molecular biology”, F. M. Ausubel, et al. eds., 1987; the series “Methods in Enzymology,” Academic Press, San Diego, CA.; “PCR 2: a practical approach”, M. J. MacPherson, B. D. Hames and G. R. Taylor eds., Oxford University Press, 1995; “Antibodies, a laboratory manual” Harlow, E, and Lane, D. eds., Cold Spring Harbor Laboratory, 1988; “Goodman & Gilman's The Pharmacological Basis of Therapeutics,” 11^{th} Edition, McGraw-Hill, 2005; and Freshney, R. I., “Culture of Animal Cells: A Manual of Basic Technique,” 4′ edition, John Wiley & Sons, Somerset, N J, 2000, the contents of which are incorporated in their entirety herein by reference.

[0213] Host cells can be cultured in a variety of media. Commercially available media such as Ham's F10 (Sigma), Minimal Essential Medium (MEM, Sigma), RPMI-1640 (Sigma), and Dulbecco's Modified Eagle's Medium (DMEM, Sigma) are suitable for culturing eukaryotic cells. In addition, animal cells can be grown in a defined medium that lacks serum but is supplemented with hormones, growth factors or any other factors necessary for the survival and/or growth of a particular cell type. Whereas a defined medium supporting cell survival maintains the viability, morphology, capacity to metabolize and potentially, capacity of the cell to differentiate, a defined medium promoting cell growth provides all chemicals necessary for cell proliferation or multiplication. The general parameters governing mammalian cell survival and growth in vitro are well established in the art. Physicochemical parameters which may be controlled in different cell culture systems are, e.g., pH, pO₂, temperature, and osmolarity. The nutritional requirements of cells are usually provided in standard media formulations developed to provide an optimal environment. Nutrients can be divided into several categories: amino acids and their derivatives, carbohydrates, sugars, fatty acids, complex lipids, nucleic acid derivatives and vitamins. Apart from nutrients for maintaining cell metabolism, most cells also require one or more hormones from at least one of the following groups: steroids, prostaglandins, growth factors, pituitary hormones, and peptide hormones to proliferate in serum-free media (Sato, G. H., et al. in “Growth of Cells in Hormonally Defined Media”, Cold Spring Harbor Press, N.Y., 1982). In addition to hormones, cells may require transport proteins such as transferrin (plasma iron transport protein), ceruloplasmin (a copper transport protein), and high-density lipoprotein (a lipid carrier) for survival and growth in vitro. The set of optimal hormones or transport proteins will vary for each cell type. Most of these hormones or transport proteins have been added exogenously or, in a rare case, a mutant cell line has been found which does not require a particular factor. Those skilled in the art will know of other factors required for maintaining a cell culture without undue experimentation.

[0214] Growth media for growth of prokaryotic host cells include nutrient broths (liquid nutrient medium) or LB medium (Luria Bertani). Suitable media include defined and undefined media. In general, media contains a carbon source such as glucose needed for bacterial growth, water, and salts. Media may also include a source of amino acids and nitrogen, for example beef or yeast extract (in an undefined medium) or known quantities of amino acids (in a defined medium). In some embodiments, the growth medium is LB broth, for example LB Miller broth or LB Lennox broth. LB broth comprises peptone (enzymatic digestion product of casein), yeast extract and sodium chloride. In some embodiments, a selective medium is used which comprises an antibiotic. In this medium, only the desired cells possessing resistance to the antibiotic will grow.

### II). XTEN Protein Polymer and Conjugate Compositions

[0215] The present invention relates, in part, to substantially homogeneous compositions comprising extended recombinant polypeptides (XTEN). In a first aspect, the invention provides XTEN compositions that are substantially homogeneous in length. Such compositions are useful as reagent conjugation partners to create XTEN-cross-linker intermediates and XTEN-payload compositions. Additionally, it is an object of the present invention to provide methods to create the substantially homogeneous XTEN compositions. The present invention also provides methods to create such substantially homogeneous XTEN compositions at high yield.

[0216] In a second aspect, the invention provides XTEN. For example, the XTENs capable of linking to one or more payload conjugation partners, resulting in payload-XTEN conjugates are specifically engineered to incorporate defined numbers of reactive amino acids for linking to the payloads either directly or via cross-linkers or azide/alkyne reactants. The present invention also provides methods to create such engineered XTEN polymers for use in creating conjugates with payload agents of interest as compositions with enhanced pharmaceutical properties, including enhanced pharmacokinetic and pharmacologic properties, as well as reduced toxicity.

[0217] In another aspect, the invention provides substantially homogeneous XTEN polymers comprising defined numbers of cross-linkers or azide/alkyne reactants as reactant conjugation partners in monomeric and multimeric configurations and methods of the preparation of such reactants. The XTEN derivatives comprising cross-linkers or azide/alkyne reactants are used as reactants in the conjugation of payload agents to result in XTEN-payload conjugate exhibiting the desired physical, pharmaceutical, and pharmacological properties.

[0218] In another aspect, the invention provides compositions of XTEN-payload in which one or more XTEN are chemically linked to one or more payloads, including combinations of different payloads, in defined numbers in either monomeric or multimeric configurations to provide compositions with enhanced pharmaceutical, pharmacokinetic, and pharmacologic properties. Such compositions linked to such payloads may have utility, when administered to a subject, in the prevention, treatment or amelioration of diseases or conditions due to a pharmacologic or biologic effect of the payload.

[0219] 1. XTEN: Extended Recombinant Polypeptides

[0220] In one aspect, the invention provides substantially homogeneous XTEN polypeptide compositions that are useful as conjugation partners to link to one or more payloads, either directly or via a cross-linker reactant resulting in an XTEN-payload conjugate.

[0221] XTEN are polypeptides with non-naturally occurring, substantially non-repetitive sequences having a low degree or no secondary or tertiary structure under physiologic conditions. XTEN typically have from about 36 to about 3000 amino acids, of which the majority or the entirety are small hydrophilic amino acids. As used herein, “XTEN” specifically excludes whole antibodies or antibody fragments (e.g. single-chain antibodies and Fc fragments). XTEN polypeptides have utility as a conjugation partners in that they serve in various roles, conferring certain desirable properties when linked to a payload. The resulting XTEN-payload conjugates have enhanced properties, such as enhanced pharmacokinetic, physicochemical, pharmacologic, and pharmaceutical properties compared to the corresponding payload not linked to XTEN, making them useful in the treatment of certain conditions for which the payload is known in the art to be used.

[0222] The unstructured characteristic and physicochemical properties of the XTEN result, in part, from the overall amino acid composition that is disproportionately limited to 4-6 types of hydrophilic amino acids, the linking of the amino acids in a quantifiable non-repetitive design, and the length of the XTEN polypeptide. In an advantageous feature common to XTEN but uncommon to native polypeptides, the properties of XTEN disclosed herein are not tied to absolute primary amino acid sequences, as evidenced by the diversity of the exemplary sequences of Table 2 that, within varying ranges of length, possess similar properties, many of which are documented in the Examples. Accordingly, XTEN have properties more like non-proteinaceous, hydrophilic polymers than they do proteins. The XTEN of the present invention exhibit one or more of the following advantageous properties: conformational flexibility, reduced or lack of secondary structure, high degree of aqueous solubility, high degree of protease resistance, low immunogenicity, low binding to mammalian receptors, a defined degree of charge, and increased hydrodynamic (or Stokes) radii; properties that are similar to certain hydrophilic polymers (e.g., polyethylene glycol) that make them particularly useful as conjugation partners.

[0223] The XTEN component(s) of the subject conjugates are designed to behave like denatured peptide sequences under physiological conditions, despite the extended length of the polymer. “Denatured” describes the state of a peptide in solution that is characterized by a large conformational freedom of the peptide backbone. Most peptides and proteins adopt a denatured conformation in the presence of high concentrations of denaturants or at elevated temperature. Peptides in denatured conformation have, for example, characteristic circular dichroism (CD) spectra and are characterized by a lack of long-range interactions as determined by NMR. “Denatured conformation” and “unstructured conformation” are used synonymously herein. In some embodiments, the invention provides XTEN sequences that, under physiologic conditions, resemble denatured sequences that are largely devoid of secondary structure. In other cases, the XTEN sequences are substantially devoid of secondary structure under physiologic conditions. “Largely devoid,” as used in this context, means that less than 50% of the XTEN amino acid residues of the XTEN sequence contribute to secondary structure as measured or determined by the means described herein. “Substantially devoid,” as used in this context, means that at least about 60%, or about 70%, or about 80%, or about 90%, or about 95%, or about 97%, or at least about 99% of the XTEN amino acid residues of the XTEN sequence do not contribute to secondary structure, as measured or determined by the methods described herein.

[0224] A variety of methods and assays are known in the art for determining the physicochemical properties of the subject XTEN. Such properties include but are not limited to secondary or tertiary structure, solubility, protein aggregation, stability, absolute and apparent molecular weight, purity and uniformity, melting properties, contamination and water content. The methods to measure such properties include analytical centrifugation, EPR, HPLC-ion exchange, HPLC-size exclusion chromatography (SEC), HPLC-reverse phase, light scattering, capillary electrophoresis, circular dichroism, differential scanning calorimetry, fluorescence, HPLC-ion exchange, HPLC-size exclusion, IR, NMR, Raman spectroscopy, refractometry, and UV/Visible spectroscopy. In particular, secondary structure can be measured spectrophotometrically, e.g., by circular dichroism spectroscopy in the “far-UV” spectral region (190-250 nm). Secondary structure elements, such as alpha-helix and beta-sheet, each give rise to a characteristic shape and magnitude of CD spectra, as does the lack of these structure elements. Secondary structure can also be predicted for a polypeptide sequence via certain computer programs or algorithms, such as the well-known Chou-Fasman algorithm (Chou, P. Y., et al. (1974) Biochemistry, 13: 222-45) and the Garnier-Osguthorpe-Robson algorithm (“Gor algorithm”) (Gamier J, Gibrat J F, Robson B. (1996), GOR method for predicting protein secondary structure from amino acid sequence. Methods Enzymol 266:540-553), as described in US Patent Application Publication No. 20030228309A1. For a given sequence, the algorithms can predict whether there exists some or no secondary structure at all, expressed as the total and/or percentage of residues of the sequence that form, for example, alpha-helices or beta-sheets or the percentage of residues of the sequence predicted to result in random coil formation (which lacks secondary structure). Polypeptide sequences can be analyzed using the Chou-Fasman algorithm using sites on the world wide web at, for example, fasta.bioch.virginia.edu/fasta_www2/fasta_www.cgi?rm=misc1 and the Gor algorithm at npsa-pbil.ibcp.fr/cgi-bin/npsa_automat.pl?page=npsa_gor4.html (both accessed on Sep. 5, 2012). Additional methods are disclosed in Arnau, et al., Prot Expr and Purif (2006) 48, 1-13.

[0225] In one embodiment, the XTEN sequences used in the subject conjugates have an alpha-helix percentage ranging from 0% to less than about 5% as determined by the Chou-Fasman algorithm. In another embodiment, the XTEN sequences have a beta-sheet percentage ranging from 0% to less than about 5% as determined by the Chou-Fasman algorithm. In one embodiment, the XTEN sequences of the conjugates have an alpha-helix percentage ranging from 0% to less than about 5% and a beta-sheet percentage ranging from 0% to less than about 5% as determined by the Chou-Fasman algorithm. In one embodiment, the XTEN sequences of the conjugates have an alpha-helix percentage less than about 2% and a beta-sheet percentage less than about 2%. The XTEN sequences of the conjugate compositions have a high degree of random coil percentage, as determined by the GOR algorithm. In some embodiments, an XTEN sequence has at least about 80%, more preferably at least about 90%, more preferably at least about 91%, more preferably at least about 92%, more preferably at least about 93%, more preferably at least about 94%, more preferably at least about 95%, more preferably at least about 96%, more preferably at least about 97%, more preferably at least about 98%, and most preferably at least about 99% random coil, as determined by the GOR algorithm. In one embodiment, the XTEN sequences of the conjugate compositions have an alpha-helix percentage ranging from 0% to less than about 5% and a beta-sheet percentage ranging from 0% to less than about 5% as determined by the Chou-Fasman algorithm and at least about 90% random coil, as determined by the GOR algorithm. In another embodiment, the XTEN sequences of the disclosed compositions have an alpha-helix percentage less than about 2% and a beta-sheet percentage less than about 2% at least about 90% random coil, as determined by the GOR algorithm. In another embodiment, the XTEN sequences of the compositions are substantially lacking secondary structure as measured by circular dichroism.

[0226] The selection criteria for the XTEN to be linked to the payload used to create the conjugate compositions generally relate to attributes of physicochemical properties and conformational structure of the XTEN that is, in turn, used to confer enhanced pharmaceutical, pharmacologic, and pharmacokinetic properties to the compositions.

### 1. Non-Repetitive Sequences

[0227] It is specifically contemplated that the subject XTEN sequences included in the subject conjugate composition embodiments are substantially non-repetitive. In general, repetitive amino acid sequences have a tendency to aggregate or form higher order structures, as exemplified by natural repetitive sequences such as collagens and leucine zippers. These repetitive amino acids may also tend to form contacts resulting in crystalline or pseudocrystaline structures. In contrast, the low tendency of non-repetitive sequences to aggregate enables the design of long-sequence XTENs with a relatively low frequency of charged amino acids that would otherwise be likely to aggregate if the sequences were repetitive. The non-repetitiveness of a subject XTEN can be observed by assessing one or more of the following features. In one embodiment, a substantially non-repetitive XTEN sequence has no three contiguous amino acids in the sequence that are identical amino acid types unless the amino acid is serine, in which case no more than three contiguous amino acids are serine residues. In another embodiment, as described more fully below, a substantially non-repetitive XTEN sequence in which 80-99% of the sequence is comprised of motifs of 9 to 14 amino acid residues wherein the motifs consist of 3, 4, 5 or 6 types of amino acids selected from glycine (G), alanine (A), serine (S), threonine (T), glutamate (E) and proline (P), and wherein the sequence of any two contiguous amino acid residues in any one motif is not repeated more than twice in the sequence motif.

[0228] The degree of repetitiveness of a polypeptide or a gene can be measured by computer programs or algorithms or by other means known in the art. According to the current invention, algorithms to be used in calculating the degree of repetitiveness of a particular polypeptide, such as an XTEN, are disclosed herein, and examples of sequences analyzed by algorithms are provided (see Examples, below). In one embodiment, the repetitiveness of a polypeptide of a predetermined length can be calculated (hereinafter “subsequence score”) according to the formula given by Equation I:

$$Subsequence score = \frac{{\sum }_{i = 1}^{m} {Count}_{i}}{m} \qquad I$$

[0229] wherein: m=(amino acid length of polypeptide)—(amino acid length of subsequence)+1; and Countᵢ=cumulative number of occurrences of each unique subsequence within
   [0230] sequenceᵢ

[0231] An algorithm termed “SegScore” was developed to apply the foregoing equation to quantitate repetitiveness of polypeptides, such as an XTEN, providing the subsequence score wherein sequences of a predetermined amino acid length “n” are analyzed for repetitiveness by determining the number of times (a “count”) a unique subsequence of length “s” appears in the set length, divided by the absolute number of subsequences within the predetermined length of the sequence. FIG. 79 depicts a logic flowchart of the SegScore algorithm, while FIG. 80 portrays a schematic of how a subsequence score is derived for a fictitious XTEN with 11 amino acids and a subsequence length of 3 amino acid residues. For example, a predetermined polypeptide length of 200 amino acid residues has 192 overlapping 9-amino acid subsequences and 198 3-mer subsequences, but the subsequence score of any given polypeptide will depend on the absolute number of unique subsequences and how frequently each unique subsequence (meaning a different amino acid sequence) appears in the predetermined length of the sequence.

[0232] In the context of the present invention, “subsequence score” means the sum of occurrences of each unique 3-mer frame across 200 consecutive amino acids of the cumulative XTEN polypeptide divided by the absolute number of unique 3-mer subsequences within the 200 amino acid sequence. Examples of such subsequence scores derived from 200 consecutive amino acids of repetitive and non-repetitive polypeptides are presented in Example 45. In one embodiment, the invention provides a XTEN-payload comprising one XTEN in which the XTEN has a subsequence score less than 12, more preferably less than 10, more preferably less than 9, more preferably less than 8, more preferably less than 7, more preferably less than 6, and most preferably less than 5. In another embodiment, the invention provides XTEN-cross-linker conjugates comprising an XTEN in which the XTEN have a subsequence score of less than 10, more preferably less than 9, more preferably less than 8, more preferably less than 7, more preferably less than 6, and most preferably less than 5. In another embodiment, the invention provides XTEN-click-chemistry conjugates comprising an XTEN in which the XTEN have a subsequence score of less than 10, more preferably less than 9, more preferably less than 8, more preferably less than 7, more preferably less than 6, and most preferably less than 5. In yet another embodiment, the invention provides XTEN conjugate compositions comprising at least two linked XTEN in which each individual XTEN has a subsequence score of less than 10, or less than 9, or less than 8, or less than 7, or less than 6, or less than 5, or less. In yet another embodiment, the invention provides XTEN conjugate compositions comprising at least three linked XTEN in which each individual XTEN has a subsequence score of less than 10, or less than 9, or less than 8, or less than 7, or less than 6, or less than 5, or less. In the embodiments of the XTEN compositions described herein, an XTEN with a subsequence score of 10 or less (i.e., 9, 8, 7, etc.) is characterized as substantially non-repetitive.

[0233] In one aspect, the non-repetitive characteristic of XTEN of the present invention together with the particular types of amino acids that predominate in the XTEN, rather than the absolute primary sequence, confers one or more of the enhanced physicochemical and biological properties of the XTEN and the resulting XTEN-payload conjugates. These enhanced properties include a higher degree of expression of the XTEN protein in the host cell, greater genetic stability of the gene encoding XTEN, a greater degree of solubility, less tendency to aggregate, and enhanced pharmacokinetics of the resulting conjugate compared to payloads not conjugated to XTEN or payloads conjugated to proteins having repetitive sequences. These enhanced properties permit more efficient manufacturing, greater uniformity of the final product, lower cost of goods, and/or facilitate the formulation of XTEN-comprising pharmaceutical preparations containing extremely high protein concentrations, in some cases exceeding 100 mg/ml. In some embodiments, the XTEN polypeptide sequences of the conjugates are designed to have a low degree of internal repetitiveness in order to reduce or substantially eliminate immunogenicity when administered to a mammal. Polypeptide sequences composed of short, repeated motifs largely limited to only three amino acids, such as glycine, serine and glutamate, may result in relatively high antibody titers when administered to a mammal despite the absence of predicted T-cell epitopes in these sequences. This may be caused by the repetitive nature of polypeptides, as it has been shown that immunogens with repeated epitopes, including protein aggregates, cross-linked immunogens, and repetitive carbohydrates are highly immunogenic and can, for example, result in the cross-linking of B-cell receptors causing B-cell activation. (Johansson, J., et al. (2007) Vaccine, 25:1676-82; Yankai, Z., et al. (2006) Biochem Biophys Res Commun, 345:1365-71; Hsu, C. T., et al. (2000) Cancer Res, 60:3701-5); Bachmann M F, et al. Eur J Immunol. (1995) 25(12):3445-3451).

### 2. Exemplary Sequence Motifs

[0234] The present invention encompasses XTEN used as conjugation partners that comprise multiple units of shorter sequences, or motifs, in which the amino acid sequences of the motifs are substantially non-repetitive. The non-repetitive property can be met even using a “building block” approach using a library of sequence motifs that are multimerized to create the XTEN sequences, as shown in FIGS. 18-19. While an XTEN sequence may consist of multiple units of as few as four different types of sequence motifs, because the motifs themselves generally consist of non-repetitive amino acid sequences, the overall XTEN sequence is designed to render the sequence substantially non-repetitive.

[0235] In one embodiment, an XTEN has a substantially non-repetitive sequence of greater than about 36 to about 3000, or about 100 to about 2000, or about 144 to about 1000 amino acid residues, wherein at least about 80%, or at least about 85%, or at least about 90%, or at least about 95%, or at least about 97%, or about 99% to about 100% of the XTEN sequence consists of non-overlapping sequence motifs, and wherein each of the motifs has about 9 to 36 amino acid residues. As used herein, “non-overlapping” means that the individual motifs do not share amino acid residues but, rather, are fused to other motifs or amino acid residues in a linear fashion. In other embodiments, at least about 80%, or at least about 85%, or at least about 90%, or at least about 95%, or at least about 97%, or about 99% to about 100% of the XTEN sequence consists of non-overlapping sequence motifs wherein each of the motifs has 9 to 14 amino acid residues. In still other embodiments, at least about 80%, or at least about 85%, or at least about 90%, or at least about 95%, or at least about 97%, or about 99% to about 100% of the XTEN sequence consists of non-overlapping sequence motifs wherein each of the motifs has 12 amino acid residues. In these embodiments, it is preferred that the sequence motifs are composed of substantially (e.g., 90% or more) or exclusively small hydrophilic amino acids, such that the overall sequence has an unstructured, flexible characteristic. Examples of amino acids that are included in XTEN are, e.g., arginine, lysine, threonine, alanine, asparagine, glutamine, aspartate, glutamate, serine, and glycine. In one embodiment, XTEN sequences have predominately four to six types of amino acids selected from glycine (G), alanine (A), serine (S), threonine (T), glutamate (E) or proline (P) that are arranged in a substantially non-repetitive sequence that is about 36 to about 3000, or about 100 to about 2000, or about 144 to about 1000 amino acid residues in length. In some embodiment, an XTEN sequence is made of 4, 5, or 6 types of amino acids selected from the group consisting of glycine (G), alanine (A), serine (S), threonine (T), glutamate (E) or proline (P). In some embodiments, XTEN have sequences of about 36 to about 1000, or about 100 to about 2000, or about 400 to about 3000 amino acid residues wherein at least about 80% of the sequence consists of non-overlapping sequence motifs wherein each of the motifs has 9 to 36 amino acid residues and wherein at least 90%, or at least 91%, or at least 92%, or at least 93%, or at least 94%, or at least 95%, or at least 96%, or at least 97%, or 100% of each of the motifs consists of 4 to 6 types of amino acids selected from glycine (G), alanine (A), serine (S), threonine (T), glutamate (E) and proline (P), and wherein the content of any one amino acid type in the full-length XTEN does not exceed 30%. In other embodiments, at least about 90% of the XTEN sequence consists of non-overlapping sequence motifs wherein each of the motifs has 9 to 36 amino acid residues wherein the motifs consist of 4 to 6 types of amino acids selected from glycine (G), alanine (A), serine (S), threonine (T), glutamate (E) and proline (P), and wherein the content of any one amino acid type in the full-length XTEN does not exceed 40%, or about 30%, or 25%, or about 17%, or about 12%, or about 8%. In other embodiments, at least about 90% of the XTEN sequence consists of non-overlapping sequence motifs wherein each of the motifs has 12 amino acid residues consisting of 4 to 6 types of amino acids selected from glycine (G), alanine (A), serine (S), threonine (T), glutamate (E) and proline (P), and wherein the content of any one amino acid type in the full-length XTEN does not exceed 40%, or 30%, or about 25%, or about 17%, or about 12%, or about 8%. In yet other embodiments, at least about 90%, or about 91%, or about 92%, or about 93%, or about 94%, or about 95%, or about %%, or about 97%, or about 98%, or about 99%, to about 100% of the XTEN sequence consists of non-overlapping sequence motifs wherein each of the motifs has 12 amino acid residues consisting of glycine (G), alanine (A), serine (S), threonine (T), glutamate (E) and proline (P).

[0236] In some embodiments, the invention provides XTEN-payload, XTEN-cross-linker, and XTEN-click-chemistry reactant conjugates comprising one, or two, or three, or four or more substantially non-repetitive XTEN sequence(s) of about 36 to about 1000 amino acid residues, or cumulatively about 100 to about 3000 amino acid residues wherein at least about 80%, or at least about 90%, or about 91%, or about 92%, or about 93%, or about 94%, or about 95%, or about %%, or about 97%, or about 98%, or about 99% to about 100% of the sequence consists of multiple units of four or more non-overlapping sequence motifs selected from the amino acid sequences of Table 1, wherein the overall sequence remains substantially non-repetitive. In some embodiments, the XTEN comprises non-overlapping sequence motifs in which about 80%, or at least about 85%, or at least about 90%, or about 91%, or about 92%, or about 93%, or about 94%, or about 95%, or about 96%, or about 97%, or about 98%, or about 99% or about 100% of the sequence consists of multiple units of non-overlapping sequences selected from a single motif family selected from Table 1, resulting in a family sequence. Family, as applied to motifs, means that the XTEN has motifs selected from a single motif category from Table 1; i.e., AD, AE, AF, AG, AM, AQ, BC, or BD. In other embodiments, the XTEN comprises multiple units of motif sequences from two or more of the motif families of Table 1 selected to achieve desired physicochemical characteristics, including such properties as net charge, hydrophilicity, lack of secondary structure, or lack of repetitiveness that may be conferred by the amino acid composition of the motifs, described more fully below. In the embodiments hereinabove described in this paragraph, the motifs or portions of the motifs incorporated into the XTEN can be selected and assembled using the methods described herein to achieve an XTEN of about 36, about 42, about 72, about 144, about 288, about 576, about 864, about 1000, about 2000 to about 3000 amino acid residues, or any intermediate length. Non-limiting examples of XTEN family sequences useful for incorporation into the subject conjugates are presented in Table 2. It is intended that a specified sequence mentioned relative to Table 2 has that sequence set forth in Table 2, while a generalized reference to an AE144 sequence, for example, is intended to encompass any AE sequence having 144 amino acid residues; e.g., AE144_1A, AE144_2A, etc., or a generalized reference to an AG144 sequence, for example, is intended to encompass any AG sequence having 144 amino acid residues, e.g., AG144_1, AG144_2, AG144_A, AG144_B, AG144_C, etc.

TABLE 1
XTEN Sequence Motifs of 12 Amino
Acids and Motif Families

| Motif | MOTIF | SEQ ID |
|---|---|---|
| Family* | SEQUENCE | NO: |
| AD | GESPGGSSGSES | 26 |
| AD | GSEGSSGPGESS | 27 |
| AD | GSSESGSSEGGP | 28 |
| AD | GSGGEPSESGSS | 29 |
| AE, AM | GSPAGSPTSTEE | 30 |
| AE, AM, AQ | GSEPATSGSETP | 31 |
| AE, AM, AQ | GTSESATPESGP | 32 |
| AE, AM, AQ | GTSTEPSEGSAP | 33 |
| AF, AM | GSTSESPSGTAP | 34 |
| AF, AM | GTSTPESGSASP | 35 |
| AF, AM | GTSPSGESSTAP | 36 |
| AF, AM | GSTSSTAESPGP | 37 |
| AG, AM | GTPGSGTASSSP | 38 |
| AG, AM | GSSTPSGATGSP | 39 |
| AG, AM | GSSPSASTGTGP | 40 |
| AG, AM | GASPGTSSTGSP | 41 |
| AQ | GEPAGSPTSTSE | 42 |
| AQ | GTGEPSSTPASE | 43 |
| AQ | GSGPSTESAPTE | 44 |
| AQ | GSETPSGPSETA | 45 |
| AQ | GPSETSTSEPGA | 46 |
| AQ | GSPSEPTEGTSA | 47 |
| BC | GSGASEPTSTEP | 48 |
| BC | GSEPATSGTEPS | 49 |
| BC | GTSEPSTSEPGA | 50 |
| BC | GTSTEPSEPGSA | 51 |
| BD | GSTAGSETSTEA | 52 |
| BD | GSETATSGSETA | 53 |
| BD | GTSESATSESGA | 54 |
| BD | GTSTEASEGSAS | 55 |

*Denotes individual motif sequences that, when used together in various permutations, results in a “family sequence”

TABLE 2
XTEN Polypeptides

| | | SEQ |
|---|---|---|
| XTEN | | ID |
| Name | Amino Acid Sequence | NO: |
| AE42 | GAPGSPAGSPTSTEEGTSESATPESGPGSEPATSGSETPASS | 56 |
| AE42_1 | TEPSEGSAPGSPAGSPTSTEEGTSESATPESGPGSEPATSGS | 57 |
| AE42_2 | PAGSPTSTEEGTSTEPSEGSAPGTSESATPESGPGSEPATSG | 58 |
| AE42_3 | SEPATSGSETPGTSESATPESGPGTSTEPSEGSAPGSPAGSP | 59 |
| AG42_1 | GAPSPSASTGTGPGTPGSGTASSSPGSSTPSGATGSPGPSGP | 60 |
| AG42_2 | GPGTPGSGTASSSPGSSTPSGATGSPGSSPSASTGTGPGASP | 61 |
| AG42_3 | SPSASTGTGPGASPGTSSTGSPGTPGSGTASSSPGSSTPSGA | 62 |
| AG42_4 | SASTGTGPGASPGTSSTGSPGTPGSGTASSSPGSSTPSGATG | 63 |
| AE48 | MAEPAGSPTSTEEGTPGSGTASSSPGSSTPSGATGSPGASPGTSSTGS | 64 |
| AM48 | MAEPAGSPTSTEEGASPGTSSTGSPGSSTPSGATGSPGSSTPSGATGS | 65 |
| AE144 | GSEPATSGSETPGTSESATPESGPGSEPATSGSETPGSPAGSPTSTEEGTSTEPS | 66 |
| | EGSAPGSEPATSGSETPGSEPATSGSETPGSEPATSGSETPGTSTEPSEGSAPGT | |
| | SESATPESGPGSEPATSGSETPGTSTEPSEGSAP | |
| AE144_lA | SPAGSPTSTEEGTSESATPESGPGTSTEPSEGSAPGSPAGSPTSTEEGTSTEPSE | 67 |
| | GSAPGTSTEPSEGSAPGTSESATPESGPGSEPATSGSETPGSEPATSGSETPGSP | |
| | AGSPTSTEEGTSESATPESGPGTSTEPSEGSAPG | |
| AE144_2A | TSTEPSEGSAPGSPAGSPTSTEEGTSTEPSEGSAPGTSTEPSEGSAPGTSESATP | 68 |
| | ESGPGTSTEPSEGSAPGTSESATPESGPGSEPATSGSETPGTSTEPSEGSAPGTS | |
| | TEPSEGSAPGTSESATPESGPGTSESATPESGPG | |
| AE144_2B | TSTEPSEGSAPGSPAGSPTSTEEGTSTEPSEGSAPGTSTEPSEGSAPGTSESATP | 69 |
| | ESGPGTSTEPSEGSAPGTSESATPESGPGSEPATSGSETPGTSTEPSEGSAPGTS | |
| | TEPSEGSAPGTSESATPESGPGTSESATPESGPG | |
| AE144_3A | SPAGSPTSTEEGTSESATPESGPGSEPATSGSETPGTSESATPESGPGTSTEPSE | 70 |
| | GSAPGTSTEPSEGSAPGTSTEPSEGSAPGTSTEPSEGSAPGTSTEPSEGSAPGTS | |
| | TEPSEGSAPGSPAGSPTSTEEGTSTEPSEGSAPG | |
| AE144_3B | SPAGSPTSTEEGTSESATPESGPGSEPATSGSETPGTSESATPESGPGTSTEPSE | 71 |
| | GSAPGTSTEPSEGSAPGTSTEPSEGSAPGTSTEPSEGSAPGTSTEPSEGSAPGTS | |
| | TEPSEGSAPGSPAGSPTSTEEGTSTEPSEGSAPG | |
| AE144_4A | TSESATPESGPGSEPATSGSETPGTSESATPESGPGSEPATSGSETPGTSESATP | 72 |
| | ESGPGTSTEPSEGSAPGTSESATPESGPGSPAGSPTSTEEGSPAGSPTSTEEGSP | |
| | AGSPTSTEEGTSESATPESGPGTSTEPSEGSAPG | |
| AE144_4B | TSESATPESGPGSEPATSGSETPGTSESATPESGPGSEPATSGSETPGTSESATP | 73 |
| | ESGPGTSTEPSEGSAPGTSESATPESGPGSPAGSPTSTEEGSPAGSPTSTEEGSP | |
| | AGSPTSTEEGTSESATPESGPGTSTEPSEGSAPG | |
| AE144_5A | TSESATPESGPGSEPATSGSETPGTSESATPESGPGSEPATSGSETPGTSESATP | 74 |
| | ESGPGTSTEPSEGSAPGSPAGSPTSTEEGTSESATPESGPGSEPATSGSETPGTS | |
| | ESATPESGPGSPAGSPTSTEEGSPAGSPTSTEEG | |
| AE144_6B | TSTEPSEGSAPGTSESATPESGPGTSESATPESGPGTSESATPESGPGSEPATSG | 75 |
| | SETPGSEPATSGSETPGSPAGSPTSTEEGTSTEPSEGSAPGTSTEPSEGSAPGSE | |
| | PATSGSETPGTSESATPESGPGTSTEPSEGSAPG | |
| AF144 | GTSTPESGSASPGTSPSGESSTAPGTSPSGESSTAPGSTSSTAESPGPGSTSESP | 76 |
| | SGTAPGSTSSTAESPGPGTSPSGESSTAPGTSTPESGSASPGSTSSTAESPGPGT | |
| | SPSGESSTAPGTSPSGESSTAPGTSPSGESSTAP | |
| AG144_1 | SGTASSSPGSSTPSGATGSPGTPGSGTASSSPGSSTPSGATGSPGSSTPSGATGS | 77 |
| | PGSSPSASTGTGPGSSPSASTGTGPGASPGTSSTGSPGTPGSGTASSSPGSSTPS | |
| | GATGSPGSSPSASTGTGPGSSPSASTGTGPGASP | |
| AG144_2 | PGSSPSASTGTGPGSSPSASTGTGPGTPGSGTASSSPGSSTPSGATGSPGSSPSA | 78 |
| | STGTGPGASPGTSSTGSPGTPGSGTASSSPGSSTPSGATGSPGTPGSGTASSSPG | |
| | ASPGTSSTGSPGASPGTSSTGSPGTPGSGTASSS | |
| AG144_A | GASPGTSSTGSPGSSPSASTGTGPGSSPSASTGTGPGTPGSGTASSSPGSSTPSG | 79 |
| | ATGSPGSSPSASTGTGPGASPGTSSTGSPGTPGSGTASSSPGSSTPSGATGSPGT | |
| | PGSGTASSSPGASPGTSSTGSPGASPGTSSTGSP | |
| AG144_B | GTPGSGTASSSPGSSTPSGATGSPGASPGTSSTGSPGTPGSGTASSSPGSSTPSG | 80 |
| | ATGSPGSSPSASTGTGPGSSPSASTGTGPGSSTPSGATGSPGSSTPSGATGSPGA | |
| | SPGTSSTGSPGASPGTSSTGSPGASPGTSSTGSP | |
| AG144_C | GTPGSGTASSSPGASPGTSSTGSPGASPGTSSTGSPGASPGTSSTGSPGSSPSAS | 81 |
| | TGTGPGTPGSGTASSSPGASPGTSSTGSPGASPGTSSTGSPGASPGTSSTGSPGS | |
| | STPSGATGSPGSSTPSGATGSPGASPGTSSTGSP | |
| AG144_F | GSSPSASTGTGPGSSPSASTGTGPGASPGTSSTGSPGASPGTSSTGSPGSSTPSG | 82 |
| | ATGSPGSSPSASTGTGPGASPGTSSTGSPGSSPSASTGTGPGTPGSGTASSSPGS | |
| | STPSGATGSPGSSTPSGATGSPGASPGTSSTGSP | |
| AG144_3 | GTPGSGTASSSPGSSTPSGATGSPGSSTPSGATGSPGSSPSASTGTGPGSSPSAS | 83 |
| | TGTGPGASPGTSSTGSPGTPGSGTASSSPGSSTPSGATGSPGSSPSASTGTGPGS | |
| | SPSASTGTGPGASPGTSSTGSPGASPGTSSTGSP | |
| AG144_4 | GTPGSGTASSSPGSSTPSGATGSPGSSPSASTGTGPGSSPSASTGTGPGASPGTS | 84 |
| | STGSPGASPGTSSTGSPGSSTPSGATGSPGSSPSASTGTGPGASPGTSSTGSPGS | |
| | SPSASTGTGPGTPGSGTASSSPGSSTPSGATGSP | |
| AE288_1 | GTSESATPESGPGSEPATSGSETPGTSESATPESGPGSEPATSGSETPGTSESAT | 85 |
| | PESGPGTSTEPSEGSAPGSPAGSPTSTEEGTSESATPESGPGSEPATSGSETPGT | |
| | SESATPESGPGSPAGSPTSTEEGSPAGSPTSTEEGTSTEPSEGSAPGTSESATPE | |
| | SGPGTSESATPESGPGTSESATPESGPGSEPATSGSETPGSEPATSGSETPGSPA | |
| | GSPTSTEEGTSTEPSEGSAPGTSTEPSEGSAPGSEPATSGSETPGTSESATPESG | |
| | PGTSTEPSEGSAP | |
| AE288_2 | GSPAGSPTSTEEGTSESATPESGPGSEPATSGSETPGTSESATPESGPGTSTEPS | 86 |
| | EGSAPGTSTEPSEGSAPGTSTEPSEGSAPGTSTEPSEGSAPGTSTEPSEGSAPGT | |
| | STEPSEGSAPGSPAGSPTSTEEGTSTEPSEGSAPGTSESATPESGPGSEPATSGS | |
| | ETPGTSESATPESGPGSEPATSGSETPGTSESATPESGPGTSTEPSEGSAPGTSE | |
| | SATPESGPGSPAGSPTSTEEGSPAGSPTSTEEGSPAGSPTSTEEGTSESATPESG | |
| | PGTSTEPSEGSAP | |
| AG288_1 | PGASPGTSSTGSPGASPGTSSTGSPGTPGSGTASSSPGSSTPSGATGSPGTPGSG | 87 |
| | TASSSPGSSTPSGATGSPGTPGSGTASSSPGSSTPSGATGSPGSSTPSGATGSPG | |
| | SSPSASTGTGPGSSPSASTGTGPGASPGTSSTGSPGTPGSGTASSSPGSSTPSGA | |
| | TGSPGSSPSASTGTGPGSSPSASTGTGPGASPGTSSTGSPGASPGTSSTGSPGSS | |
| | TPSGATGSPGSSPSASTGTGPGASPGTSSTGSPGSSPSASTGTGPGTPGSGTASS | |
| | SPGSSTPSGATGS | |
| AG288_2 | GSSPSASTGTGPGSSPSASTGTGPGTPGSGTASSSPGSSTPSGATGSPGSSPSAS | 88 |
| | TGTGPGASPGTSSTGSPGTPGSGTASSSPGSSTPSGATGSPGTPGSGTASSSPGA | |
| | SPGTSSTGSPGASPGTSSTGSPGTPGSGTASSSPGSSTPSGATGSPGASPGTSST | |
| | GSPGTPGSGTASSSPGSSTPSGATGSPGSSPSASTGTGPGSSPSASTGTGPGSST | |
| | PSGATGSPGSSTPSGATGSPGASPGTSSTGSPGASPGTSSTGSPGASPGTSSTGS | |
| | PGTPGSGTASSSP | |
| AF504 | GASPGTSSTGSPGSSPSASTGTGPGSSPSASTGTGPGTPGSGTASSSPGSSTPSG | 89 |
| | ATGSPGSXPSASTGTGPGASPGTSSTGSPGTPGSGTASSSPGSSTPSGATGSPGT | |
| | PGSGTASSSPGASPGTSSTGSPGASPGTSSTGSPGTPGSGTASSSPGSSTPSGAT | |
| | GSPGASPGTSSTGSPGTPGSGTASSSPGSSTPSGATGSPGSXPSASTGTGPGSSP | |
| | SASTGTGPGSSTPSGATGSPGSSTPSGATGSPGASPGTSSTGSPGASPGTSSTGS | |
| | PGASPGTSSTGSPGTPGSGTASSSPGASPGTSSTGSPGASPGTSSTGSPGASPGT | |
| | SSTGSPGSSPSASTGTGPGTPGSGTASSSPGASPGTSSTGSPGASPGTSSTGSPG | |
| | ASPGTSSTGSPGSSTPSGATGSPGSSTPSGATGSPGASPGTSSTGSPGTPGSGTA | |
| | SSSPGSSTPSGATGSPGSSTPSGATGSPGSSTPSGATGSPGSSPSASTGTGPGAS | |
| | PGTSSTGSP | |
| AF540 | GSTSSTAESPGPGSTSSTAESPGPGSTSESPSGTAPGSTSSTAESPGPGSTSSTA | 90 |
| | ESPGPGTSTPESGSASPGSTSESPSGTAPGTSPSGESSTAPGSTSESPSGTAPGS | |
| | TSESPSGTAPGTSPSGESSTAPGSTSESPSGTAPGSTSESPSGTAPGTSPSGESS | |
| | TAPGSTSESPSGTAPGSTSESPSGTAPGSTSESPSGTAPGTSTPESGSASPGSTS | |
| | ESPSGTAPGTSTPESGSASPGSTSSTAESPGPGSTSSTAESPGPGTSTPESGSAS | |
| | PGTSTPESGSASPGSTSESPSGTAPGTSTPESGSASPGTSTPESGSASPGSTSES | |
| | PSGTAPGSTSESPSGTAPGSTSESPSGTAPGSTSSTAESPGPGTSTPESGSASPG | |
| | TSTPESGSASPGSTSESPSGTAPGSTSESPSGTAPGTSTPESGSASPGSTSESPS | |
| | GTAPGSTSESPSGTAPGTSTPESGSASPGTSPSGESSTAPGSTSSTAESPGPGTS | |
| | PSGESSTAPGSTSSTAESPGPGTSTPESGSASPGSTSESPSGTAP | |
| AD576 | GSSESGSSEGGPGSGGEPSESGSSGSSESGSSEGGPGSSESGSSEGGPGSSESGS | 91 |
| | SEGGPGSSESGSSEGGPGSSESGSSEGGPGESPGGSSGSESGSEGSSGPGESSGS | |
| | SESGSSEGGPGSSESGSSEGGPGSSESGSSEGGPGSGGEPSESGSSGESPGGSSG | |
| | SESGESPGGSSGSESGSGGEPSESGSSGSSESGSSEGGPGSGGEPSESGSSGSGG | |
| | EPSESGSSGSEGSSGPGESSGESPGGSSGSESGSGGEPSESGSSGSGGEPSESGS | |
| | SGSGGEPSESGSSGSSESGSSEGGPGESPGGSSGSESGESPGGSSGSESGESPGG | |
| | SSGSESGESPGGSSGSESGESPGGSSGSESGSSESGSSEGGPGSGGEPSESGSSG | |
| | SEGSSGPGESSGSSESGSSEGGPGSGGEPSESGSSGSSESGSSEGGPGSGGEPSE | |
| | SGSSGESPGGSSGSESGESPGGSSGSESGSSESGSSEGGPGSGGEPSESGSSGSS | |
| | ESGSSEGGPGSGGEPSESGSSGSGGEPSESGSSGESPGGSSGSESGSEGSSGPGE | |
| | SSGSSESGSSEGGPGSEGSSGPGESS | |
| AE576 | GSPAGSPTSTEEGTSESATPESGPGTSTEPSEGSAPGSPAGSPTSTEEGTSTEPS | 92 |
| | EGSAPGTSTEPSEGSAPGTSESATPESGPGSEPATSGSETPGSEPATSGSETPGS | |
| | PAGSPTSTEEGTSESATPESGPGTSTEPSEGSAPGTSTEPSEGSAPGSPAGSPTS | |
| | TEEGTSTEPSEGSAPGTSTEPSEGSAPGTSESATPESGPGTSTEPSEGSAPGTSE | |
| | SATPESGPGSEPATSGSETPGTSTEPSEGSAPGTSTEPSEGSAPGTSESATPESG | |
| | PGTSESATPESGPGSPAGSPTSTEEGTSESATPESGPGSEPATSGSETPGTSESA | |
| | TPESGPGTSTEPSEGSAPGTSTEPSEGSAPGTSTEPSEGSAPGTSTEPSEGSAPG | |
| | TSTEPSEGSAPGTSTEPSEGSAPGSPAGSPTSTEEGTSTEPSEGSAPGTSESATP | |
| | ESGPGSEPATSGSETPGTSESATPESGPGSEPATSGSETPGTSESATPESGPGTS | |
| | TEPSEGSAPGTSESATPESGPGSPAGSPTSTEEGSPAGSPTSTEEGSPAGSPTST | |
| | EEGTSESATPESGPGTSTEPSEGSAP | |
| AF576 | GSTSSTAESPGPGSTSSTAESPGPGSTSESPSGTAPGSTSSTAESPGPGSTSSTA | 93 |
| | ESPGPGTSTPESGSASPGSTSESPSGTAPGTSPSGESSTAPGSTSESPSGTAPGS | |
| | TSESPSGTAPGTSPSGESSTAPGSTSESPSGTAPGSTSESPSGTAPGTSPSGESS | |
| | TAPGSTSESPSGTAPGSTSESPSGTAPGSTSESPSGTAPGTSTPESGSASPGSTS | |
| | ESPSGTAPGTSTPESGSASPGSTSSTAESPGPGSTSSTAESPGPGTSTPESGSAS | |
| | PGTSTPESGSASPGSTSESPSGTAPGTSTPESGSASPGTSTPESGSASPGSTSES | |
| | PSGTAPGSTSESPSGTAPGSTSESPSGTAPGSTSSTAESPGPGTSTPESGSASPG | |
| | TSTPESGSASPGSTSESPSGTAPGSTSESPSGTAPGTSTPESGSASPGSTSESPS | |
| | GTAPGSTSESPSGTAPGTSTPESGSASPGTSPSGESSTAPGSTSSTAESPGPGTS | |
| | PSGESSTAPGSTSSTAESPGPGTSTPESGSASPGSTSESPSGTAPGSTSSTAESP | |
| | GPGTSTPESGSASPGTSTPESGSASP | |
| AG576 | PGTPGSGTASSSPGSSTPSGATGSPGSSPSASTGTGPGSSPSASTGTGPGSSTPS | 94 |
| | GATGSPGSSTPSGATGSPGASPGTSSTGSPGASPGTSSTGSPGASPGTSSTGSPG | |
| | TPGSGTASSSPGASPGTSSTGSPGASPGTSSTGSPGASPGTSSTGSPGSSPSAST | |
| | GTGPGTPGSGTASSSPGASPGTSSTGSPGASPGTSSTGSPGASPGTSSTGSPGSS | |
| | TPSGATGSPGSSTPSGATGSPGASPGTSSTGSPGTPGSGTASSSPGSSTPSGATG | |
| | SPGSSTPSGATGSPGSSTPSGATGSPGSSPSASTGTGPGASPGTSSTGSPGASPG | |
| | TSSTGSPGTPGSGTASSSPGASPGTSSTGSPGASPGTSSTGSPGASPGTSSTGSP | |
| | GASPGTSSTGSPGTPGSGTASSSPGSSTPSGATGSPGTPGSGTASSSPGSSTPSG | |
| | ATGSPGTPGSGTASSSPGSSTPSGATGSPGSSTPSGATGSPGSSPSASTGTGPGS | |
| | SPSASTGTGPGASPGTSSTGSPGTPGSGTASSSPGSSTPSGATGSPGSSPSASTG | |
| | TGPGSSPSASTGTGPGASPGTSSTGS | |
| AE624 | MAEPAGSPTSTEEGTPGSGTASSSPGSSTPSGATGSPGASPGTSSTGSPGSPAGS | 95 |
| | PTSTEEGTSESATPESGPGTSTEPSEGSAPGSPAGSPTSTEEGTSTEPSEGSAPG | |
| | TSTEPSEGSAPGTSESATPESGPGSEPATSGSETPGSEPATSGSETPGSPAGSPT | |
| | STEEGTSESATPESGPGTSTEPSEGSAPGTSTEPSEGSAPGSPAGSPTSTEEGTS | |
| | TEPSEGSAPGTSTEPSEGSAPGTSESATPESGPGTSTEPSEGSAPGTSESATPES | |
| | GPGSEPATSGSETPGTSTEPSEGSAPGTSTEPSEGSAPGTSESATPESGPGTSES | |
| | ATPESGPGSPAGSPTSTEEGTSESATPESGPGSEPATSGSETPGTSESATPESGP | |
| | GTSTEPSEGSAPGTSTEPSEGSAPGTSTEPSEGSAPGTSTEPSEGSAPGTSTEPS | |
| | EGSAPGTSTEPSEGSAPGSPAGSPTSTEEGTSTEPSEGSAPGTSESATPESGPGS | |
| | EPATSGSETPGTSESATPESGPGSEPATSGSETPGTSESATPESGPGTSTEPSEG | |
| | SAPGTSESATPESGPGSPAGSPTSTEEGSPAGSPTSTEEGSPAGSPTSTEEGTSE | |
| | SATPESGPGTSTEPSEGSAP | |
| AD836 | GSSESGSSEGGPGSSESGSSEGGPGESPGGSSGSESGSGGEPSESGSSGESPGGS | 96 |
| | SGSESGESPGGSSGSESGSSESGSSEGGPGSSESGSSEGGPGSSESGSSEGGPGE | |
| | SPGGSSGSESGESPGGSSGSESGESPGGSSGSESGSSESGSSEGGPGSSESGSSE | |
| | GGPGSSESGSSEGGPGSSESGSSEGGPGSSESGSSEGGPGSSESGSSEGGPGSGG | |
| | EPSESGSSGESPGGSSGSESGESPGGSSGSESGSGGEPSESGSSGSEGSSGPGES | |
| | SGSSESGSSEGGPGSGGEPSESGSSGSEGSSGPGESSGSSESGSSEGGPGSGGEP | |
| | SESGSSGESPGGSSGSESGSGGEPSESGSSGSGGEPSESGSSGSSESGSSEGGPG | |
| | SGGEPSESGSSGSGGEPSESGSSGSEGSSGPGESSGESPGGSSGSESGSEGSSGP | |
| | GESSGSEGSSGPGESSGSGGEPSESGSSGSSESGSSEGGPGSSESGSSEGGPGES | |
| | PGGSSGSESGSGGEPSESGSSGSEGSSGPGESSGESPGGSSGSESGSEGSSGPGS | |
| | SESGSSEGGPGSGGEPSESGSSGSEGSSGPGESSGSEGSSGPGESSGSEGSSGPG | |
| | ESSGSGGEPSESGSSGSGGEPSESGSSGESPGGSSGSESGESPGGSSGSESGSGG | |
| | EPSESGSSGSEGSSGPGESSGESPGGSSGSESGSSESGSSEGGPGSSESGSSEGG | |
| | PGSSESGSSEGGPGSGGEPSESGSSGSSESGSSEGGPGESPGGSSGSESGSGGEP | |
| | SESGSSGSSESGSSEGGPGESPGGSSGSESGSGGEPSESGSSGESPGGSSGSESG | |
| | SGGEPSESGSS | |
| AE864 | GSPAGSPTSTEEGTSESATPESGPGTSTEPSEGSAPGSPAGSPTSTEEGTSTEPS | 97 |
| | EGSAPGTSTEPSEGSAPGTSESATPESGPGSEPATSGSETPGSEPATSGSETPGS | |
| | PAGSPTSTEEGTSESATPESGPGTSTEPSEGSAPGTSTEPSEGSAPGSPAGSPTS | |
| | TEEGTSTEPSEGSAPGTSTEPSEGSAPGTSESATPESGPGTSTEPSEGSAPGTSE | |
| | SATPESGPGSEPATSGSETPGTSTEPSEGSAPGTSTEPSEGSAPGTSESATPESG | |
| | PGTSESATPESGPGSPAGSPTSTEEGTSESATPESGPGSEPATSGSETPGTSESA | |
| | TPESGPGTSTEPSEGSAPGTSTEPSEGSAPGTSTEPSEGSAPGTSTEPSEGSAPG | |
| | TSTEPSEGSAPGTSTEPSEGSAPGSPAGSPTSTEEGTSTEPSEGSAPGTSESATP | |
| | ESGPGSEPATSGSETPGTSESATPESGPGSEPATSGSETPGTSESATPESGPGTS | |
| | TEPSEGSAPGTSESATPESGPGSPAGSPTSTEEGSPAGSPTSTEEGSPAGSPTST | |
| | EEGTSESATPESGPGTSTEPSEGSAPGTSESATPESGPGSEPATSGSETPGTSES | |
| | ATPESGPGSEPATSGSETPGTSESATPESGPGTSTEPSEGSAPGSPAGSPTSTEE | |
| | GTSESATPESGPGSEPATSGSETPGTSESATPESGPGSPAGSPTSTEEGSPAGSP | |
| | TSTEEGTSTEPSEGSAPGTSESATPESGPGTSESATPESGPGTSESATPESGPGS | |
| | EPATSGSETPGSEPATSGSETPGSPAGSPTSTEEGTSTEPSEGSAPGTSTEPSEG | |
| | SAPGSEPATSGSETPGTSESATPESGPGTSTEPSEGSAP | |
| AF864 | GSTSESPSGTAPGTSPSGESSTAPGSTSESPSGTAPGSTSESPSGTAPGTSTPES | 98 |
| | GSASPGTSTPESGSASPGSTSESPSGTAPGSTSESPSGTAPGTSPSGESSTAPGS | |
| | TSESPSGTAPGTSPSGESSTAPGTSPSGESSTAPGSTSSTAESPGPGTSPSGESS | |
| | TAPGTSPSGESSTAPGSTSSTAESPGPGTSTPESGSASPGTSTPESGSASPGSTS | |
| | ESPSGTAPGSTSESPSGTAPGTSTPESGSASPGSTSSTAESPGPGTSTPESGSAS | |
| | PGSTSESPSGTAPGTSPSGESSTAPGSTSSTAESPGPGTSPSGESSTAPGTSTPE | |
| | SGSASPGSTSSTAESPGPGSTSSTAESPGPGSTSSTAESPGPGSTSSTAESPGPG | |
| | TSPSGESSTAPGSTSESPSGTAPGSTSESPSGTAPGTSTPESGPXXXGASASGAP | |
| | STXXXXSESPSGTAPGSTSESPSGTAPGSTSESPSGTAPGSTSESPSGTAPGSTS | |
| | ESPSGTAPGSTSESPSGTAPGTSTPESGSASPGTSPSGESSTAPGTSPSGESSTA | |
| | PGSTSSTAESPGPGTSPSGESSTAPGTSTPESGSASPGSTSESPSGTAPGSTSES | |
| | PSGTAPGTSPSGESSTAPGSTSESPSGTAPGTSTPESGSASPGTSTPESGSASPG | |
| | STSESPSGTAPGTSTPESGSASPGSTSSTAESPGPGSTSESPSGTAPGSTSESPS | |
| | GTAPGTSPSGESSTAPGSTSSTAESPGPGTSPSGESSTAPGTSTPESGSASPGTS | |
| | PSGESSTAPGTSPSGESSTAPGTSPSGESSTAPGSTSSTAESPGPGSTSSTAESP | |
| | GPGTSPSGESSTAPGSSPSASTGTGPGSSTPSGATGSPGSSTPSGATGSP | |
| AG864_2 | GASPGTSSTGSPGSSPSASTGTGPGSSPSASTGTGPGTPGSGTASSSPGSSTPSG | 99 |
| | ATGSPGSSPSASTGTGPGASPGTSSTGSPGTPGSGTASSSPGSSTPSGATGSPGT | |
| | PGSGTASSSPGASPGTSSTGSPGASPGTSSTGSPGTPGSGTASSSPGSSTPSGAT | |
| | GSPGASPGTSSTGSPGTPGSGTASSSPGSSTPSGATGSPGSSPSASTGTGPGSSP | |
| | SASTGTGPGSSTPSGATGSPGSSTPSGATGSPGASPGTSSTGSPGASPGTSSTGS | |
| | PGASPGTSSTGSPGTPGSGTASSSPGASPGTSSTGSPGASPGTSSTGSPGASPGT | |
| | SSTGSPGSSPSASTGTGPGTPGSGTASSSPGASPGTSSTGSPGASPGTSSTGSPG | |
| | ASPGTSSTGSPGSSTPSGATGSPGSSTPSGATGSPGASPGTSSTGSPGTPGSGTA | |
| | SSSPGSSTPSGATGSPGSSTPSGATGSPGSSTPSGATGSPGSSPSASTGTGPGAS | |
| | PGTSSTGSPGASPGTSSTGSPGTPGSGTASSSPGASPGTSSTGSPGASPGTSSTG | |
| | SPGASPGTSSTGSPGASPGTSSTGSPGTPGSGTASSSPGSSTPSGATGSPGTPGS | |
| | GTASSSPGSSTPSGATGSPGTPGSGTASSSPGSSTPSGATGSPGSSTPSGATGSP | |
| | GSSPSASTGTGPGSSPSASTGTGPGASPGTSSTGSPGTPGSGTASSSPGSSTPSG | |
| | ATGSPGSSPSASTGTGPGSSPSASTGTGPGASPGTSSTGSPGASPGTSSTGSPGS | |
| | STPSGATGSPGSSPSASTGTGPGASPGTSSTGSPGSSPSASTGTGPGTPGSGTAS | |
| | SSPGSSTPSGATGSPGSSTPSGATGSPGASPGTSSTGSP | |
| AM875 | GTSTEPSEGSAPGSEPATSGSETPGSPAGSPTSTEEGSTSSTAESPGPGTSTPES | 100 |
| | GSASPGSTSESPSGTAPGSTSESPSGTAPGTSTPESGSASPGTSTPESGSASPGS | |
| | EPATSGSETPGTSESATPESGPGSPAGSPTSTEEGTSTEPSEGSAPGTSESATPE | |
| | SGPGTSTEPSEGSAPGTSTEPSEGSAPGSPAGSPTSTEEGTSTEPSEGSAPGTST | |
| | EPSEGSAPGTSESATPESGPGTSESATPESGPGTSTEPSEGSAPGTSTEPSEGSA | |
| | PGTSESATPESGPGTSTEPSEGSAPGSEPATSGSETPGSPAGSPTSTEEGSSTPS | |
| | GATGSPGTPGSGTASSSPGSSTPSGATGSPGTSTEPSEGSAPGTSTEPSEGSAPG | |
| | SEPATSGSETPGSPAGSPTSTEEGSPAGSPTSTEEGTSTEPSEGSAPGASASGAP | |
| | STGGTSESATPESGPGSPAGSPTSTEEGSPAGSPTSTEEGSTSSTAESPGPGSTS | |
| | ESPSGTAPGTSPSGESSTAPGTPGSGTASSSPGSSTPSGATGSPGSSPSASTGTG | |
| | PGSEPATSGSETPGTSESATPESGPGSEPATSGSETPGSTSSTAESPGPGSTSST | |
| | AESPGPGTSPSGESSTAPGSEPATSGSETPGSEPATSGSETPGTSTEPSEGSAPG | |
| | STSSTAESPGPGTSTPESGSASPGSTSESPSGTAPGTSTEPSEGSAPGTSTEPSE | |
| | GSAPGTSTEPSEGSAPGSSTPSGATGSPGSSPSASTGTGPGASPGTSSTGSPGSE | |
| | PATSGSETPGTSESATPESGPGSPAGSPTSTEEGSSTPSGATGSPGSSPSASTGT | |
| | GPGASPGTSSTGSPGTSESATPESGPGTSTEPSEGSAPGTSTEPSEGSAP | |
| AM1318 | GTSTEPSEGSAPGSEPATSGSETPGSPAGSPTSTEEGSTSSTAESPGPGTSTPES | 101 |
| | GSASPGSTSESPSGTAPGSTSESPSGTAPGTSTPESGSASPGTSTPESGSASPGS | |
| | EPATSGSETPGTSESATPESGPGSPAGSPTSTEEGTSTEPSEGSAPGTSESATPE | |
| | SGPGTSTEPSEGSAPGTSTEPSEGSAPGSPAGSPTSTEEGTSTEPSEGSAPGTST | |
| | EPSEGSAPGTSESATPESGPGTSESATPESGPGTSTEPSEGSAPGTSTEPSEGSA | |
| | PGTSESATPESGPGTSTEPSEGSAPGSEPATSGSETPGSPAGSPTSTEEGSSTPS | |
| | GATGSPGTPGSGTASSSPGSSTPSGATGSPGTSTEPSEGSAPGTSTEPSEGSAPG | |
| | SEPATSGSETPGSPAGSPTSTEEGSPAGSPTSTEEGTSTEPSEGSAPGPEPTGPA | |
| | PSGGSEPATSGSETPGTSESATPESGPGSPAGSPTSTEEGTSESATPESGPGSPA | |
| | GSPTSTEEGSPAGSPTSTEEGTSESATPESGPGSPAGSPTSTEEGSPAGSPTSTE | |
| | EGSTSSTAESPGPGSTSESPSGTAPGTSPSGESSTAPGSTSESPSGTAPGSTSES | |
| | PSGTAPGTSPSGESSTAPGTSTEPSEGSAPGTSESATPESGPGTSESATPESGPG | |
| | SEPATSGSETPGTSESATPESGPGTSESATPESGPGTSTEPSEGSAPGTSESATP | |
| | ESGPGTSTEPSEGSAPGTSPSGESSTAPGTSPSGESSTAPGTSPSGESSTAPGTS | |
| | TEPSEGSAPGSPAGSPTSTEEGTSTEPSEGSAPGSSPSASTGTGPGSSTPSGATG | |
| | SPGSSTPSGATGSPGSSTPSGATGSPGSSTPSGATGSPGASPGTSSTGSPGASAS | |
| | GAPSTGGTSPSGESSTAPGSTSSTAESPGPGTSPSGESSTAPGTSESATPESGPG | |
| | TSTEPSEGSAPGTSTEPSEGSAPGSSPSASTGTGPGSSTPSGATGSPGASPGTSS | |
| | TGSPGTSTPESGSASPGTSPSGESSTAPGTSPSGESSTAPGTSESATPESGPGSE | |
| | PATSGSETPGTSTEPSEGSAPGSTSESPSGTAPGSTSESPSGTAPGTSTPESGSA | |
| | SPGSPAGSPTSTEEGTSESATPESGPGTSTEPSEGSAPGSPAGSPTSTEEGTSES | |
| | ATPESGPGSEPATSGSETPGSSTPSGATGSPGASPGTSSTGSPGSSTPSGATGSP | |
| | GSTSESPSGTAPGTSPSGESSTAPGSTSSTAESPGPGSSTPSGATGSPGASPGTS | |
| | STGSPGTPGSGTASSSPGSPAGSPTSTEEGSPAGSPTSTEEGTSTEPSEGSAP | |
| BC864 | GTSTEPSEPGSAGTSTEPSEPGSAGSEPATSGTEPSGSGASEPTSTEPGSEPATS | 102 |
| | GTEPSGSEPATSGTEPSGSEPATSGTEPSGSGASEPTSTEPGTSTEPSEPGSAGS | |
| | EPATSGTEPSGTSTEPSEPGSAGSEPATSGTEPSGSEPATSGTEPSGTSTEPSEP | |
| | GSAGTSTEPSEPGSAGSEPATSGTEPSGSEPATSGTEPSGTSEPSTSEPGAGSGA | |
| | SEPTSTEPGTSEPSTSEPGAGSEPATSGTEPSGSEPATSGTEPSGTSTEPSEPGS | |
| | AGTSTEPSEPGSAGSGASEPTSTEPGSEPATSGTEPSGSEPATSGTEPSGSEPAT | |
| | SGTEPSGSEPATSGTEPSGTSTEPSEPGSAGSEPATSGTEPSGSGASEPTSTEPG | |
| | TSTEPSEPGSAGSEPATSGTEPSGSGASEPTSTEPGTSTEPSEPGSAGSGASEPT | |
| | STEPGSEPATSGTEPSGSGASEPTSTEPGSEPATSGTEPSGSGASEPTSTEPGTS | |
| | TEPSEPGSAGSEPATSGTEPSGSGASEPTSTEPGTSTEPSEPGSAGSEPATSGTE | |
| | PSGTSTEPSEPGSAGSEPATSGTEPSGTSTEPSEPGSAGTSTEPSEPGSAGTSTE | |
| | PSEPGSAGTSTEPSEPGSAGTSTEPSEPGSAGTSTEPSEPGSAGTSEPSTSEPGA | |
| | GSGASEPTSTEPGTSTEPSEPGSAGTSTEPSEPGSAGTSTEPSEPGSAGSEPATS | |
| | GTEPSGSGASEPTSTEPGSEPATSGTEPSGSEPATSGTEPSGSEPATSGTEPSGS | |
| | EPATSGTEPSGTSEPSTSEPGAGSEPATSGTEPSGSGASEPTSTEPGTSTEPSEP | |
| | GSAGSEPATSGTEPSGSGASEPTSTEPGTSTEPSEPGSA | |
| BD864 | GSETATSGSETAGTSESATSESGAGSTAGSETSTEAGTSESATSESGAGSETATS | 103 |
| | GSETAGSETATSGSETAGTSTEASEGSASGTSTEASEGSASGTSESATSESGAGS | |
| | ETATSGSETAGTSTEASEGSASGSTAGSETSTEAGTSESATSESGAGTSESATSE | |
| | SGAGSETATSGSETAGTSESATSESGAGTSTEASEGSASGSETATSGSETAGSET | |
| | ATSGSETAGTSTEASEGSASGSTAGSETSTEAGTSESATSESGAGTSTEASEGSA | |
| | SGSETATSGSETAGSTAGSETSTEAGSTAGSETSTEAGSETATSGSETAGTSESA | |
| | TSESGAGTSESATSESGAGSETATSGSETAGTSESATSESGAGTSESATSESGAG | |
| | SETATSGSETAGSETATSGSETAGTSTEASEGSASGSTAGSETSTEAGSETATSG | |
| | SETAGTSESATSESGAGSTAGSETSTEAGSTAGSETSTEAGSTAGSETSTEAGTS | |
| | TEASEGSASGSTAGSETSTEAGSTAGSETSTEAGTSTEASEGSASGSTAGSETST | |
| | EAGSETATSGSETAGTSTEASEGSASGTSESATSESGAGSETATSGSETAGTSES | |
| | ATSESGAGTSESATSESGAGSETATSGSETAGTSESATSESGAGSETATSGSETA | |
| | GTSTEASEGSASGTSTEASEGSASGSTAGSETSTEAGSTAGSETSTEAGSETATS | |
| | GSETAGTSESATSESGAGTSESATSESGAGSETATSGSETAGSETATSGSETAGS | |
| | ETATSGSETAGTSTEASEGSASGTSESATSESGAGSETATSGSETAGSETATSGS | |
| | ETAGTSESATSESGAGTSESATSESGAGSETATSGSETA | |
| AE948 | GTSTEPSEGSAPGTSESATPESGPGSEPATSGSETPGTSESATPESGPGTSTEPS | 104 |
| | EGSAPGSPAGSPTSTEEGTSTEPSEGSAPGSEPATSGSETPGTSESATPESGPGT | |
| | SESATPESGPGSEPATSGSETPGTSTEPSEGSAPGTSESATPESGPGTSTEPSEG | |
| | SAPGTSTEPSEGSAPGSEPATSGSETPGTSTEPSEGSAPGSEPATSGSETPGSEP | |
| | ATSGSETPGTSTEPSEGSAPGSEPATSGSETPGSEPATSGSETPGTSTEPSEGSA | |
| | PGSEPATSGSETPGSPAGSPTSTEEGTSESATPESGPGTSTEPSEGSAPGSEPAT | |
| | SGSETPGTSESATPESGPGSEPATSGSETPGSEPATSGSETPGTSESATPESGPG | |
| | SPAGSPTSTEEGTSESATPESGPGSPAGSPTSTEEGTSTEPSEGSAPGTSESATP | |
| | ESGPGTSTEPSEGSAPGTSTEPSEGSAPGSPAGSPTSTEEGTSTEPSEGSAPGTS | |
| | ESATPESGPGSPAGSPTSTEEGSPAGSPTSTEEGTSESATPESGPGTSESATPES | |
| | GPGTSTEPSEGSAPGSPAGSPTSTEEGTSESATPESGPGTSTEPSEGSAPGSEPA | |
| | TSGSETPGSPAGSPTSTEEGTSESATPESGPGTSTEPSEGSAPGSEPATSGSETP | |
| | GSEPATSGSETPGSEPATSGSETPGSPAGSPTSTEEGTSESATPESGPGSEPATS | |
| | GSETPGSEPATSGSETPGSPAGSPTSTEEGSPAGSPTSTEEGSPAGSPTSTEEGT | |
| | SESATPESGPGSEPATSGSETPGTSTEPSEGSAPGTSTEPSEGSAPGSPAGSPTS | |
| | TEEGSPAGSPTSTEEGSPAGSPTSTEEGTSTEPSEGSAPGTSESATPESGPGTSE | |
| | SATPESGPGTSTEPSEGSAPGTSTEPSEGSAPGTSTEPSEGSAPGTSESATPESG | |
| | PGTSESATPESGP | |
| AE1044 | GSEPATSGSETPGSEPATSGSETPGTSTEPSEGSAPGTSESATPESGPGSPAGSP | 105 |
| | TSTEEGTSTEPSEGSAPGTSESATPESGPGTSESATPESGPGSEPATSGSETPGS | |
| | EPATSGSETPGTSESATPESGPGTSESATPESGPGSPAGSPTSTEEGTSTEPSEG | |
| | SAPGSEPATSGSETPGTSTEPSEGSAPGSPAGSPTSTEEGSPAGSPTSTEEGSPA | |
| | GSPTSTEEGTSTEPSEGSAPGTSESATPESGPGSEPATSGSETPGTSESATPESG | |
| | PGTSESATPESGPGSPAGSPTSTEEGTSTEPSEGSAPGSEPATSGSETPGTSTEP | |
| | SEGSAPGTSESATPESGPGSPAGSPTSTEEGTSTEPSEGSAPGTSTEPSEGSAPG | |
| | SPAGSPTSTEEGTSTEPSEGSAPGTSESATPESGPGSPAGSPTSTEEGTSESATP | |
| | ESGPGSEPATSGSETPGTSTEPSEGSAPGSEPATSGSETPGTSESATPESGPGTS | |
| | TEPSEGSAPGTSESATPESGPGTSTEPSEGSAPGTSTEPSEGSAPGSEPATSGSE | |
| | TPGSPAGSPTSTEEGTSESATPESGPGTSTEPSEGSAPGSPAGSPTSTEEGTSTE | |
| | PSEGSAPGTSESATPESGPGTSTEPSEGSAPGSEPATSGSETPGSEPATSGSETP | |
| | GTSESATPESGPGTSESATPESGPGTSESATPESGPGTSTEPSEGSAPGTSTEPS | |
| | EGSAPGSPAGSPTSTEEGSPAGSPTSTEEGTSESATPESGPGSPAGSPTSTEEGS | |
| | PAGSPTSTEEGTSESATPESGPGSEPATSGSETPGTSTEPSEGSAPGSEPATSGS | |
| | ETPGSPAGSPTSTEEGTSESATPESGPGTSESATPESGPGSEPATSGSETPGTST | |
| | EPSEGSAPGTSTEPSEGSAPGSPAGSPTSTEEGTSTEPSEGSAPGTSTEPSEGSA | |
| | PGSEPATSGSETPGSPAGSPTSTEEGTSESATPESGPGTSTEPSEGSAPGSPAGS | |
| | PTSTEEGTSESATPESGPGTSESATPESGPGTST | |
| AE1140 | GSEPATSGSETPGSEPATSGSETPGTSTEPSEGSAPGSEPATSGSETPGTSESAT | 106 |
| | PESGPGSEPATSGSETPGSPAGSPTSTEEGTSESATPESGPGSEPATSGSETPGT | |
| | STEPSEGSAPGTSESATPESGPGTSESATPESGPGTSTEPSEGSAPGTSTEPSEG | |
| | SAPGSEPATSGSETPGSPAGSPTSTEEGTSTEPSEGSAPGSEPATSGSETPGSPA | |
| | GSPTSTEEGTSTEPSEGSAPGTSESATPESGPGSPAGSPTSTEEGTSTEPSEGSA | |
| | PGTSESATPESGPGSEPATSGSETPGTSESATPESGPGSEPATSGSETPGTSTEP | |
| | SEGSAPGTSTEPSEGSAPGTSTEPSEGSAPGSPAGSPTSTEEGSPAGSPTSTEEG | |
| | TSESATPESGPGTSTEPSEGSAPGTSTEPSEGSAPGSPAGSPTSTEEGSPAGSPT | |
| | STEEGSPAGSPTSTEEGTSESATPESGPGSEPATSGSETPGTSESATPESGPGSP | |
| | AGSPTSTEEGTSTEPSEGSAPGTSESATPESGPGSEPATSGSETPGSPAGSPTST | |
| | EEGTSTEPSEGSAPGTSESATPESGPGTSESATPESGPGSPAGSPTSTEEGTSTE | |
| | PSEGSAPGSPAGSPTSTEEGSPAGSPTSTEEGTSESATPESGPGSEPATSGSETP | |
| | GTSTEPSEGSAPGSEPATSGSETPGTSESATPESGPGTSTEPSEGSAPGTSESAT | |
| | PESGPGTSESATPESGPGTSTEPSEGSAPGTSTEPSEGSAPGSEPATSGSETPGT | |
| | SESATPESGPGTSTEPSEGSAPGSEPATSGSETPGSPAGSPTSTEEGTSESATPE | |
| | SGPGSPAGSPTSTEEGTSTEPSEGSAPGSEPATSGSETPGSEPATSGSETPGSEP | |
| | ATSGSETPGTSESATPESGPGTSESATPESGPGTSTEPSEGSAPGTSTEPSEGSA | |
| | PGSEPATSGSETPGTSTEPSEGSAPGTSESATPESGPGSPAGSPTSTEEGSPAGS | |
| | PTSTEEGTSTEPSEGSAPGSPAGSPTSTEEGSPA | |
| AE1236 | GSPAGSPTSTEEGTSTEPSEGSAPGSPAGSPTSTEEGTSESATPESGPGSEPATS | 107 |
| | GSETPGTSTEPSEGSAPGTSTEPSEGSAPGTSESATPESGPGTSTEPSEGSAPGT | |
| | STEPSEGSAPGSEPATSGSETPGSPAGSPTSTEEGTSESATPESGPGSPAGSPTS | |
| | TEEGTSTEPSEGSAPGSPAGSPTSTEEGTSTEPSEGSAPGSPAGSPTSTEEGTST | |
| | EPSEGSAPGSPAGSPTSTEEGSPAGSPTSTEEGTSTEPSEGSAPGSEPATSGSET | |
| | PGSPAGSPTSTEEGTSESATPESGPGSEPATSGSETPGSEPATSGSETPGTSESA | |
| | TPESGPGSPAGSPTSTEEGTSESATPESGPGSEPATSGSETPGSEPATSGSETPG | |
| | TSESATPESGPGTSESATPESGPGTSTEPSEGSAPGTSTEPSEGSAPGTSESATP | |
| | ESGPGSPAGSPTSTEEGTSTEPSEGSAPGSEPATSGSETPGSPAGSPTSTEEGTS | |
| | TEPSEGSAPGTSTEPSEGSAPGSPAGSPTSTEEGSPAGSPTSTEEGSPAGSPTST | |
| | EEGTSESATPESGPGSEPATSGSETPGTSESATPESGPGTSESATPESGPGTSTE | |
| | PSEGSAPGTSESATPESGPGSPAGSPTSTEEGTSESATPESGPGTSESATPESGP | |
| | GTSTEPSEGSAPGSEPATSGSETPGTSTEPSEGSAPGSPAGSPTSTEEGTSESAT | |
| | PESGPGTSTEPSEGSAPGTSTEPSEGSAPGSEPATSGSETPGSEPATSGSETPGT | |
| | SESATPESGPGSEPATSGSETPGSPAGSPTSTEEGTSESATPESGPGSEPATSGS | |
| | ETPGTSTEPSEGSAPGTSESATPESGPGTSESATPESGPGTSTEPSEGSAPGSEP | |
| | ATSGSETPGTSTEPSEGSAPGSPAGSPTSTEEGSPAGSPTSTEEGTSESATPESG | |
| | PGSEPATSGSETPGSPAGSPTSTEEGSPAGSPTSTEEGTSESATPESGPGSEPAT | |
| | SGSETPGTSTEPSEGSAPGTSTEPSEGSAPGSEP | |
| AE1332 | GSPAGSPTSTEEGTSTEPSEGSAPGTSESATPESGPGTSESATPESGPGSEPATS | 108 |
| | GSETPGTSTEPSEGSAPGTSESATPESGPGSPAGSPTSTEEGTSTEPSEGSAPGT | |
| | SESATPESGPGSPAGSPTSTEEGTSTEPSEGSAPGTSESATPESGPGTSTEPSEG | |
| | SAPGSEPATSGSETPGSEPATSGSETPGSEPATSGSETPGTSESATPESGPGSPA | |
| | GSPTSTEEGTSESATPESGPGSEPATSGSETPGTSESATPESGPGTSESATPESG | |
| | PGSPAGSPTSTEEGTSTEPSEGSAPGTSESATPESGPGTSTEPSEGSAPGTSTEP | |
| | SEGSAPGTSTEPSEGSAPGSEPATSGSETPGTSTEPSEGSAPGTSESATPESGPG | |
| | TSESATPESGPGTSTEPSEGSAPGTSESATPESGPGTSESATPESGPGSEPATSG | |
| | SETPGTSTEPSEGSAPGTSESATPESGPGSPAGSPTSTEEGSPAGSPTSTEEGTS | |
| | TEPSEGSAPGSEPATSGSETPGSEPATSGSETPGTSTEPSEGSAPGSEPATSGSE | |
| | TPGSPAGSPTSTEEGTSESATPESGPGSEPATSGSETPGSEPATSGSETPGTSES | |
| | ATPESGPGTSESATPESGPGTSTEPSEGSAPGSPAGSPTSTEEGTSESATPESGP | |
| | GTSTEPSEGSAPGSEPATSGSETPGSPAGSPTSTEEGTSTEPSEGSAPGTSTEPS | |
| | EGSAPGSEPATSGSETPGTSESATPESGPGTSTEPSEGSAPGSPAGSPTSTEEGT | |
| | SESATPESGPGTSESATPESGPGTSTEPSEGSAPGSEPATSGSETPGSEPATSGS | |
| | ETPGTSTEPSEGSAPGTSESATPESGPGSPAGSPTSTEEGTSTEPSEGSAPGTST | |
| | EPSEGSAPGSPAGSPTSTEEGSPAGSPTSTEEGTSTEPSEGSAPGSEPATSGSET | |
| | PGSPAGSPTSTEEGTSESATPESGPGSEPATSGSETPGSEPATSGSETPGTSESA | |
| | TPESGPGTSESATPESGPGTSTEPSEGSAPGTST | |
| AE1428 | GSEPATSGSETPGSPAGSPTSTEEGTSTEPSEGSAPGSEPATSGSETPGTSESAT | 109 |
| | PESGPGTSTEPSEGSAPGTSESATPESGPGSPAGSPTSTEEGTSTEPSEGSAPGT | |
| | STEPSEGSAPGSPAGSPTSTEEGTSTEPSEGSAPGTSESATPESGPGSEPATSGS | |
| | ETPGTSESATPESGPGSEPATSGSETPGTSTEPSEGSAPGTSTEPSEGSAPGSEP | |
| | ATSGSETPGTSTEPSEGSAPGTSTEPSEGSAPGSPAGSPTSTEEGTSTEPSEGSA | |
| | PGTSESATPESGPGTSESATPESGPGTSTEPSEGSAPGTSTEPSEGSAPGSPAGS | |
| | PTSTEEGSPAGSPTSTEEGTSTEPSEGSAPGSEPATSGSETPGSPAGSPTSTEEG | |
| | TSTEPSEGSAPGSPAGSPTSTEEGSPAGSPTSTEEGTSESATPESGPGSEPATSG | |
| | SETPGSEPATSGSETPGTSTEPSEGSAPGSPAGSPTSTEEGSPAGSPTSTEEGTS | |
| | ESATPESGPGSEPATSGSETPGSEPATSGSETPGTSESATPESGPGSEPATSGSE | |
| | TPGSEPATSGSETPGTSESATPESGPGTSESATPESGPGTSESATPESGPGTSES | |
| | ATPESGPGSPAGSPTSTEEGTSTEPSEGSAPGTSESATPESGPGTSTEPSEGSAP | |
| | GTSTEPSEGSAPGTSESATPESGPGTSTEPSEGSAPGTSESATPESGPGSPAGSP | |
| | TSTEEGTSTEPSEGSAPGSEPATSGSETPGTSTEPSEGSAPGSEPATSGSETPGT | |
| | STEPSEGSAPGTSTEPSEGSAPGSPAGSPTSTEEGTSESATPESGPGTSTEPSEG | |
| | SAPGSEPATSGSETPGTSESATPESGPGTSESATPESGPGTSESATPESGPGTST | |
| | EPSEGSAPGSEPATSGSETPGSPAGSPTSTEEGTSESATPESGPGTSTEPSEGSA | |
| | PGTSTEPSEGSAPGSPAGSPTSTEEGTSESATPESGPGTSTEPSEGSAPGTSTEP | |
| | SEGSAPGSPAGSPTSTEEGTSESATPESGPGSPA | |
| AE1524 | GTSTEPSEGSAPGTSTEPSEGSAPGTSTEPSEGSAPGTSTEPSEGSAPGSPAGSP | 110 |
| | TSTEEGSPAGSPTSTEEGTSESATPESGPGSEPATSGSETPGTSTEPSEGSAPGT | |
| | SESATPESGPGTSTEPSEGSAPGTSESATPESGPGTSESATPESGPGSPAGSPTS | |
| | TEEGTSTEPSEGSAPGSEPATSGSETPGTSTEPSEGSAPGSPAGSPTSTEEGTST | |
| | EPSEGSAPGSPAGSPTSTEEGSPAGSPTSTEEGSPAGSPTSTEEGTSESATPESG | |
| | PGSEPATSGSETPGTSESATPESGPGTSESATPESGPGSPAGSPTSTEEGTSTEP | |
| | SEGSAPGSEPATSGSETPGTSTEPSEGSAPGSPAGSPTSTEEGSPAGSPTSTEEG | |
| | TSTEPSEGSAPGSEPATSGSETPGSPAGSPTSTEEGTSESATPESGPGSEPATSG | |
| | SETPGSPAGSPTSTEEGTSESATPESGPGTSESATPESGPGTSTEPSEGSAPGSE | |
| | PATSGSETPGSEPATSGSETPGTSESATPESGPGSEPATSGSETPGTSTEPSEGS | |
| | APGSPAGSPTSTEEGTSTEPSEGSAPGSEPATSGSETPGSEPATSGSETPGSPAG | |
| | SPTSTEEGTSESATPESGPGTSTEPSEGSAPGSPAGSPTSTEEGSPAGSPTSTEE | |
| | GTSESATPESGPGSPAGSPTSTEEGTSTEPSEGSAPGSEPATSGSETPGSEPATS | |
| | GSETPGSEPATSGSETPGTSESATPESGPGTSESATPESGPGTSTEPSEGSAPGT | |
| | STEPSEGSAPGSEPATSGSETPGTSTEPSEGSAPGTSESATPESGPGSPAGSPTS | |
| | TEEGSPAGSPTSTEEGTSTEPSEGSAPGTSESATPESGPGSPAGSPTSTEEGTST | |
| | EPSEGSAPGSEPATSGSETPGTSESATPESGPGSEPATSGSETPGTSESATPESG | |
| | PGSEPATSGSETPGSEPATSGSETPGTSTEPSEGSAPGTSESATPESGPGTSTEP | |
| | SEGSAPGTSTEPSEGSAPGTSESATPESGPGSPA | |
| AE1620 | GSEPATSGSETPGTSTEPSEGSAPGSEPATSGSETPGTSTEPSEGSAPGTSESAT | 111 |
| | PESGPGTSESATPESGPGSEPATSGSETPGTSTEPSEGSAPGTSTEPSEGSAPGT | |
| | SESATPESGPGTSTEPSEGSAPGTSTEPSEGSAPGSEPATSGSETPGSPAGSPTS | |
| | TEEGTSESATPESGPGTSESATPESGPGTSTEPSEGSAPGTSESATPESGPGSEP | |
| | ATSGSETPGTSESATPESGPGTSESATPESGPGTSTEPSEGSAPGTSTEPSEGSA | |
| | PGSEPATSGSETPGSPAGSPTSTEEGTSESATPESGPGSEPATSGSETPGSEPAT | |
| | SGSETPGTSESATPESGPGTSESATPESGPGSPAGSPTSTEEGTSTEPSEGSAPG | |
| | TSESATPESGPGTSTEPSEGSAPGTSTEPSEGSAPGTSESATPESGPGTSTEPSE | |
| | GSAPGSPAGSPTSTEEGSPAGSPTSTEEGTSESATPESGPGSEPATSGSETPGSE | |
| | PATSGSETPGTSTEPSEGSAPGTSESATPESGPGSPAGSPTSTEEGSPAGSPTST | |
| | EEGTSTEPSEGSAPGSPAGSPTSTEEGSPAGSPTSTEEGTSESATPESGPGSEPA | |
| | TSGSETPGTSTEPSEGSAPGTSTEPSEGSAPGSEPATSGSETPGSPAGSPTSTEE | |
| | GTSESATPESGPGSPAGSPTSTEEGTSTEPSEGSAPGTSESATPESGPGSEPATS | |
| | GSETPGTSESATPESGPGTSESATPESGPGSPAGSPTSTEEGTSTEPSEGSAPGS | |
| | EPATSGSETPGSPAGSPTSTEEGTSTEPSEGSAPGSEPATSGSETPGSEPATSGS | |
| | ETPGTSESATPESGPGTSESATPESGPGTSTEPSEGSAPGTSESATPESGPGSEP | |
| | ATSGSETPGTSESATPESGPGTSESATPESGPGTSTEPSEGSAPGTSESATPESG | |
| | PGSEPATSGSETPGTSTEPSEGSAPGSPAGSPTSTEEGTSESATPESGPGTSTEP | |
| | SEGSAPGTSTEPSEGSAPGSPAGSPTSTEEGTST | |
| AE1716 | GTSESATPESGPGTSTEPSEGSAPGTSESATPESGPGTSTEPSEGSAPGSEPATS | 112 |
| | GSETPGSPAGSPTSTEEGTSESATPESGPGSEPATSGSETPGSEPATSGSETPGT | |
| | SESATPESGPGTSESATPESGPGTSTEPSEGSAPGSEPATSGSETPGSEPATSGS | |
| | ETPGTSESATPESGPGTSESATPESGPGSEPATSGSETPGTSESATPESGPGSPA | |
| | GSPTSTEEGSPAGSPTSTEEGTSTEPSEGSAPGSEPATSGSETPGSPAGSPTSTE | |
| | EGTSESATPESGPGSPAGSPTSTEEGTSTEPSEGSAPGSEPATSGSETPGSPAGS | |
| | PTSTEEGTSESATPESGPGSPAGSPTSTEEGSPAGSPTSTEEGTSTEPSEGSAPG | |
| | SEPATSGSETPGSPAGSPTSTEEGTSESATPESGPGTSTEPSEGSAPGSPAGSPT | |
| | STEEGTSESATPESGPGSEPATSGSETPGTSTEPSEGSAPGSPAGSPTSTEEGTS | |
| | TEPSEGSAPGTSESATPESGPGTSESATPESGPGTSTEPSEGSAPGTSTEPSEGS | |
| | APGSEPATSGSETPGTSESATPESGPGTSESATPESGPGTSTEPSEGSAPGTSTE | |
| | PSEGSAPGSPAGSPTSTEEGSPAGSPTSTEEGTSTEPSEGSAPGSEPATSGSETP | |
| | GSEPATSGSETPGTSESATPESGPGSPAGSPTSTEEGTSESATPESGPGTSTEPS | |
| | EGSAPGTSTEPSEGSAPGSPAGSPTSTEEGSPAGSPTSTEEGTSESATPESGPGS | |
| | PAGSPTSTEEGTSTEPSEGSAPGSEPATSGSETPGSPAGSPTSTEEGSPAGSPTS | |
| | TEEGTSTEPSEGSAPGTSESATPESGPGTSESATPESGPGSPAGSPTSTEEGTST | |
| | EPSEGSAPGSPAGSPTSTEEGTSTEPSEGSAPGSPAGSPTSTEEGTSTEPSEGSA | |
| | PGTSTEPSEGSAPGSEPATSGSETPGSPAGSPTSTEEGTSESATPESGPGSEPAT | |
| | SGSETPGSPAGSPTSTEEGTSESATPESGPGTSE | |
| AE1812 | GTSESATPESGPGSPAGSPTSTEEGSPAGSPTSTEEGTSESATPESGPGSEPATS | 113 |
| | GSETPGTSTEPSEGSAPGTSTEPSEGSAPGTSTEPSEGSAPGSPAGSPTSTEEGT | |
| | STEPSEGSAPGTSESATPESGPGTSESATPESGPGSPAGSPTSTEEGSPAGSPTS | |
| | TEEGSPAGSPTSTEEGTSESATPESGPGSEPATSGSETPGTSESATPESGPGTST | |
| | EPSEGSAPGTSESATPESGPGTSTEPSEGSAPGTSTEPSEGSAPGTSESATPESG | |
| | PGSPAGSPTSTEEGTSESATPESGPGTSTEPSEGSAPGSPAGSPTSTEEGTSESA | |
| | TPESGPGSEPATSGSETPGTSTEPSEGSAPGSEPATSGSETPGSEPATSGSETPG | |
| | TSESATPESGPGTSESATPESGPGTSTEPSEGSAPGTSESATPESGPGSPAGSPT | |
| | STEEGTSTEPSEGSAPGSEPATSGSETPGTSESATPESGPGSEPATSGSETPGTS | |
| | TEPSEGSAPGTSESATPESGPGSPAGSPTSTEEGSPAGSPTSTEEGSPAGSPTST | |
| | EEGTSESATPESGPGSEPATSGSETPGTSESATPESGPGTSESATPESGPGSEPA | |
| | TSGSETPGTSTEPSEGSAPGTSTEPSEGSAPGTSTEPSEGSAPGTSESATPESGP | |
| | GSEPATSGSETPGTSESATPESGPGSEPATSGSETPGTSTEPSEGSAPGSEPATS | |
| | GSETPGSPAGSPTSTEEGTSESATPESGPGTSESATPESGPGTSESATPESGPGS | |
| | PAGSPTSTEEGTSTEPSEGSAPGTSESATPESGPGTSESATPESGPGTSTEPSEG | |
| | SAPGTSTEPSEGSAPGSPAGSPTSTEEGTSESATPESGPGSEPATSGSETPGTSE | |
| | SATPESGPGTSESATPESGPGTSTEPSEGSAPGSEPATSGSETPGTSESATPESG | |
| | PGSPAGSPTSTEEGTSTEPSEGSAPGSEPATSGSETPGSPAGSPTSTEEGTSESA | |
| | TPESGPGSPAGSPTSTEEGTSTEPSEGSAPGSEP | |
| AE1908 | GSEPATSGSETPGTSTEPSEGSAPGTSESATPESGPGSEPATSGSETPGTSTEPS | 114 |
| | EGSAPGSPAGSPTSTEEGTSESATPESGPGSPAGSPTSTEEGTSTEPSEGSAPGS | |
| | EPATSGSETPGTSTEPSEGSAPGTSESATPESGPGSEPATSGSETPGSEPATSGS | |
| | ETPGTSESATPESGPGTSTEPSEGSAPGTSESATPESGPGTSESATPESGPGSPA | |
| | GSPTSTEEGSPAGSPTSTEEGTSESATPESGPGTSESATPESGPGTSTEPSEGSA | |
| | PGTSTEPSEGSAPGSPAGSPTSTEEGTSTEPSEGSAPGSEPATSGSETPGSEPAT | |
| | SGSETPGSEPATSGSETPGSEPATSGSETPGTSESATPESGPGTSESATPESGPG | |
| | TSESATPESGPGTSTEPSEGSAPGTSESATPESGPGTSESATPESGPGTSTEPSE | |
| | GSAPGSPAGSPTSTEEGTSTEPSEGSAPGSEPATSGSETPGSPAGSPTSTEEGTS | |
| | ESATPESGPGTSTEPSEGSAPGSEPATSGSETPGTSESATPESGPGTSESATPES | |
| | GPGTSTEPSEGSAPGSEPATSGSETPGSPAGSPTSTEEGTSESATPESGPGTSES | |
| | ATPESGPGTSTEPSEGSAPGSEPATSGSETPGSPAGSPTSTEEGTSESATPESGP | |
| | GSEPATSGSETPGTSTEPSEGSAPGSEPATSGSETPGSPAGSPTSTEEGTSESAT | |
| | PESGPGTSTEPSEGSAPGSEPATSGSETPGTSESATPESGPGTSESATPESGPGS | |
| | PAGSPTSTEEGTSTEPSEGSAPGSPAGSPTSTEEGSPAGSPTSTEEGSPAGSPTS | |
| | TEEGTSESATPESGPGSEPATSGSETPGTSTEPSEGSAPGTSTEPSEGSAPGTSE | |
| | SATPESGPGTSTEPSEGSAPGTSESATPESGPGSEPATSGSETPGTSTEPSEGSA | |
| | PGTSESATPESGPGSPAGSPTSTEEGSPAGSPTSTEEGSPAGSPTSTEEGTSESA | |
| | TPESGPGSPAGSPTSTEEGTSESATPESGPGSEP | |
| AE2004A | GTSTEPSEGSAPGSEPATSGSETPGTSTEPSEGSAPGTSTEPSEGSAPGSEPATS | 115 |
| | GSETPGSPAGSPTSTEEGSPAGSPTSTEEGTSESATPESGPGSEPATSGSETPGT | |
| | STEPSEGSAPGTSTEPSEGSAPGSPAGSPTSTEEGTSESATPESGPGTSESATPE | |
| | SGPGSPAGSPTSTEEGTSTEPSEGSAPGTSESATPESGPGTSTEPSEGSAPGSEP | |
| | ATSGSETPGTSESATPESGPGSEPATSGSETPGTSTEPSEGSAPGTSTEPSEGSA | |
| | PGSPAGSPTSTEEGSPAGSPTSTEEGTSESATPESGPGSPAGSPTSTEEGTSTEP | |
| | SEGSAPGSEPATSGSETPGSEPATSGSETPGSPAGSPTSTEEGTSESATPESGPG | |
| | TSTEPSEGSAPGSEPATSGSETPGTSESATPESGPGSEPATSGSETPGSPAGSPT | |
| | STEEGTSESATPESGPGTSESATPESGPGSEPATSGSETPGTSESATPESGPGTS | |
| | ESATPESGPGTSESATPESGPGTSTEPSEGSAPGTSESATPESGPGSEPATSGSE | |
| | TPGTSTEPSEGSAPGSPAGSPTSTEEGTSTEPSEGSAPGSEPATSGSETPGSPAG | |
| | SPTSTEEGTSESATPESGPGTSESATPESGPGTSTEPSEGSAPGTSESATPESGP | |
| | GTSTEPSEGSAPGTSESATPESGPGSEPATSGSETPGTSTEPSEGSAPGTSTEPS | |
| | EGSAPGSPAGSPTSTEEGSPAGSPTSTEEGTSESATPESGPGTSTEPSEGSAPGT | |
| | SESATPESGPGSPAGSPTSTEEGSPAGSPTSTEEGSPAGSPTSTEEGTSTEPSEG | |
| | SAPGSPAGSPTSTEEGSPAGSPTSTEEGTSESATPESGPGSEPATSGSETPGSEP | |
| | ATSGSETPGTSESATPESGPGSEPATSGSETPGTSESATPESGPGTSTEPSEGSA | |
| | PGTSTEPSEGSAPGSPAGSPTSTEEGSPAGSPTSTEEGTSESATPESGPGSPAGS | |
| | PTSTEEGTSTEPSEGSAPGTSESATPESGPGTSE | |
| AG948 | GSSTPSGATGSPGTPGSGTASSSPGASPGTSSTGSPGSSPSASTGTGPGTPGSGT | 116 |
| | ASSSPGTPGSGTASSSPGTPGSGTASSSPGSSPSASTGTGPGTPGSGTASSSPGS | |
| | SPSASTGTGPGSSTPSGATGSPGSSTPSGATGSPGSSPSASTGTGPGSSTPSGAT | |
| | GSPGASPGTSSTGSPGASPGTSSTGSPGSSPSASTGTGPGSSPSASTGTGPGASP | |
| | GTSSTGSPGSSPSASTGTGPGASPGTSSTGSPGSSPSASTGTGPGASPGTSSTGS | |
| | PGTPGSGTASSSPGTPGSGTASSSPGSSTPSGATGSPGSSTPSGATGSPGSSTPS | |
| | GATGSPGASPGTSSTGSPGSSPSASTGTGPGASPGTSSTGSPGASPGTSSTGSPG | |
| | SSTPSGATGSPGSSPSASTGTGPGSSPSASTGTGPGTPGSGTASSSPGASPGTSS | |
| | TGSPGTPGSGTASSSPGSSTPSGATGSPGSSTPSGATGSPGSSPSASTGTGPGSS | |
| | PSASTGTGPGSSTPSGATGSPGASPGTSSTGSPGTPGSGTASSSPGSSPSASTGT | |
| | GPGSSTPSGATGSPGASPGTSSTGSPGSSTPSGATGSPGTPGSGTASSSPGSSPS | |
| | ASTGTGPGSSTPSGATGSPGASPGTSSTGSPGASPGTSSTGSPGTPGSGTASSSP | |
| | GTPGSGTASSSPGSSPSASTGTGPGASPGTSSTGSPGASPGTSSTGSPGTPGSGT | |
| | ASSSPGTPGSGTASSSPGSSTPSGATGSPGSSPSASTGTGPGSSTPSGATGSPGS | |
| | SPSASTGTGPGSSPSASTGTGPGTPGSGTASSSPGSSTPSGATGSPGASPGTSST | |
| | GSPGTPGSGTASSSPGTPGSGTASSSPGSSTPSGATGSPGTPGSGTASSSPGASP | |
| | GTSSTGSPGSSTPSGATGSPGSSTPSGATGSPGTPGSGTASSSPGSSTPSGATGS | |
| | PGSSTPSGATGSP | |
| AG1044 | GTPGSGTASSSPGTPGSGTASSSPGSSPSASTGTGPGTPGSGTASSSPGASPGTS | 117 |
| | STGSPGTPGSGTASSSPGSSPSASTGTGPGSSTPSGATGSPGASPGTSSTGSPGA | |
| | SPGTSSTGSPGSSPSASTGTGPGSSTPSGATGSPGSSPSASTGTGPGSSPSASTG | |
| | TGPGTPGSGTASSSPGTPGSGTASSSPGASPGTSSTGSPGSSTPSGATGSPGSSP | |
| | SASTGTGPGTPGSGTASSSPGASPGTSSTGSPGTPGSGTASSSPGSSPSASTGTG | |
| | PGSSPSASTGTGPGASPGTSSTGSPGASPGTSSTGSPGSSTPSGATGSPGSSTPS | |
| | GATGSPGTPGSGTASSSPGSSPSASTGTGPGSSTPSGATGSPGASPGTSSTGSPG | |
| | SSTPSGATGSPGSSTPSGATGSPGSSPSASTGTGPGASPGTSSTGSPGTPGSGTA | |
| | SSSPGASPGTSSTGSPGSSPSASTGTGPGTPGSGTASSSPGASPGTSSTGSPGAS | |
| | PGTSSTGSPGSSTPSGATGSPGTPGSGTASSSPGSSTPSGATGSPGASPGTSSTG | |
| | SPGTPGSGTASSSPGTPGSGTASSSPGSSTPSGATGSPGSSTPSGATGSPGTPGS | |
| | GTASSSPGSSTPSGATGSPGSSTPSGATGSPGASPGTSSTGSPGSSPSASTGTGP | |
| | GSSPSASTGTGPGASPGTSSTGSPGASPGTSSTGSPGTPGSGTASSSPGSSPSAS | |
| | TGTGPGTPGSGTASSSPGSSTPSGATGSPGSSTPSGATGSPGASPGTSSTGSPGS | |
| | SPSASTGTGPGASPGTSSTGSPGSSPSASTGTGPGSSPSASTGTGPGASPGTSST | |
| | GSPGASPGTSSTGSPGSSTPSGATGSPGASPGTSSTGSPGASPGTSSTGSPGTPG | |
| | SGTASSSPGTPGSGTASSSPGTPGSGTASSSPGSSTPSGATGSPGSSTPSGATGS | |
| | PGSSPSASTGTGPGSSPSASTGTGPGTPGSGTASSSPGSSPSASTGTGPGASPGT | |
| | SSTGSPGSSTPSGATGSPGTPGSGTASSSPGSST | |
| AG1140 | GASPGTSSTGSPGSSPSASTGTGPGSSTPSGATGSPGASPGTSSTGSPGASPGTS | 118 |
| | STGSPGSSTPSGATGSPGTPGSGTASSSPGASPGTSSTGSPGTPGSGTASSSPGT | |
| | PGSGTASSSPGSSTPSGATGSPGSSTPSGATGSPGTPGSGTASSSPGSSTPSGAT | |
| | GSPGSSTPSGATGSPGSSPSASTGTGPGSSPSASTGTGPGASPGTSSTGSPGTPG | |
| | SGTASSSPGASPGTSSTGSPGSSTPSGATGSPGTPGSGTASSSPGSSPSASTGTG | |
| | PGSSTPSGATGSPGSSPSASTGTGPGSSTPSGATGSPGASPGTSSTGSPGSSPSA | |
| | STGTGPGTPGSGTASSSPGASPGTSSTGSPGSSTPSGATGSPGASPGTSSTGSPG | |
| | SSPSASTGTGPGTPGSGTASSSPGTPGSGTASSSPGASPGTSSTGSPGTPGSGTA | |
| | SSSPGTPGSGTASSSPGSSPSASTGTGPGASPGTSSTGSPGSSTPSGATGSPGAS | |
| | PGTSSTGSPGSSPSASTGTGPGTPGSGTASSSPGSSPSASTGTGPGSSPSASTGT | |
| | GPGASPGTSSTGSPGASPGTSSTGSPGTPGSGTASSSPGASPGTSSTGSPGASPG | |
| | TSSTGSPGTPGSGTASSSPGTPGSGTASSSPGSSTPSGATGSPGSSTPSGATGSP | |
| | GTPGSGTASSSPGSSPSASTGTGPGTPGSGTASSSPGSSTPSGATGSPGSSTPSG | |
| | ATGSPGASPGTSSTGSPGTPGSGTASSSPGASPGTSSTGSPGSSTPSGATGSPGS | |
| | STPSGATGSPGTPGSGTASSSPGSSTPSGATGSPGSSTPSGATGSPGASPGTSST | |
| | GSPGSSPSASTGTGPGSSTPSGATGSPGSSTPSGATGSPGSSPSASTGTGPGSSP | |
| | SASTGTGPGSSTPSGATGSPGASPGTSSTGSPGSSPSASTGTGPGTPGSGTASSS | |
| | PGASPGTSSTGSPGSSPSASTGTGPGASPGTSSTGSPGSSTPSGATGSPGSSPSA | |
| | STGTGPGSSPSASTGTGPGASPGTSSTGSPGSST | |
| AG1236 | GSSPSASTGTGPGTPGSGTASSSPGSSPSASTGTGPGSSPSASTGTGPGTPGSGT | 119 |
| | ASSSPGASPGTSSTGSPGSSTPSGATGSPGTPGSGTASSSPGASPGTSSTGSPGT | |
| | PGSGTASSSPGTPGSGTASSSPGSSPSASTGTGPGSSPSASTGTGPGSSTPSGAT | |
| | GSPGASPGTSSTGSPGSSPSASTGTGPGTPGSGTASSSPGTPGSGTASSSPGSST | |
| | PSGATGSPGASPGTSSTGSPGSSPSASTGTGPGTPGSGTASSSPGTPGSGTASSS | |
| | PGASPGTSSTGSPGSSTPSGATGSPGSSTPSGATGSPGSSPSASTGTGPGSSPSA | |
| | STGTGPGASPGTSSTGSPGSSPSASTGTGPGSSTPSGATGSPGASPGTSSTGSPG | |
| | ASPGTSSTGSPGSSTPSGATGSPGSSPSASTGTGPGASPGTSSTGSPGASPGTSS | |
| | TGSPGTPGSGTASSSPGSSTPSGATGSPGASPGTSSTGSPGSSTPSGATGSPGTP | |
| | GSGTASSSPGSSPSASTGTGPGSSTPSGATGSPGTPGSGTASSSPGSSTPSGATG | |
| | SPGSSTPSGATGSPGASPGTSSTGSPGSSPSASTGTGPGSSPSASTGTGPGASPG | |
| | TSSTGSPGSSPSASTGTGPGTPGSGTASSSPGTPGSGTASSSPGASPGTSSTGSP | |
| | GTPGSGTASSSPGASPGTSSTGSPGTPGSGTASSSPGASPGTSSTGSPGSSTPSG | |
| | ATGSPGASPGTSSTGSPGSSPSASTGTGPGTPGSGTASSSPGTPGSGTASSSPGS | |
| | SPSASTGTGPGTPGSGTASSSPGASPGTSSTGSPGSSTPSGATGSPGTPGSGTAS | |
| | SSPGASPGTSSTGSPGTPGSGTASSSPGTPGSGTASSSPGSSTPSGATGSPGTPG | |
| | SGTASSSPGSSPSASTGTGPGSSTPSGATGSPGTPGSGTASSSPGSSTPSGATGS | |
| | PGSSTPSGATGSPGSSPSASTGTGPGASPGTSSTGSPGTPGSGTASSSPGSSPSA | |
| | STGTGPGSSPSASTGTGPGASPGTSSTGSPGASP | |
| AG1332 | GSSTPSGATGSPGSSPSASTGTGPGTPGSGTASSSPGSSPSASTGTGPGASPGTS | 120 |
| | STGSPGSSPSASTGTGPGTPGSGTASSSPGASPGTSSTGSPGSSTPSGATGSPGS | |
| | SPSASTGTGPGSSTPSGATGSPGASPGTSSTGSPGTPGSGTASSSPGASPGTSST | |
| | GSPGSSTPSGATGSPGSSTPSGATGSPGSSPSASTGTGPGTPGSGTASSSPGSST | |
| | PSGATGSPGSSTPSGATGSPGSSPSASTGTGPGTPGSGTASSSPGASPGTSSTGS | |
| | PGTPGSGTASSSPGASPGTSSTGSPGASPGTSSTGSPGTPGSGTASSSPGTPGSG | |
| | TASSSPGSSTPSGATGSPGSSTPSGATGSPGSSTPSGATGSPGASPGTSSTGSPG | |
| | SSPSASTGTGPGSSTPSGATGSPGSSPSASTGTGPGSSTPSGATGSPGTPGSGTA | |
| | SSSPGSSPSASTGTGPGSSTPSGATGSPGASPGTSSTGSPGASPGTSSTGSPGSS | |
| | PSASTGTGPGASPGTSSTGSPGSSTPSGATGSPGASPGTSSTGSPGTPGSGTASS | |
| | SPGTPGSGTASSSPGSSPSASTGTGPGTPGSGTASSSPGSSTPSGATGSPGSSPS | |
| | ASTGTGPGSSTPSGATGSPGTPGSGTASSSPGTPGSGTASSSPGSSPSASTGTGP | |
| | GSSTPSGATGSPGSSTPSGATGSPGSSPSASTGTGPGSSPSASTGTGPGASPGTS | |
| | STGSPGASPGTSSTGSPGSSTPSGATGSPGASPGTSSTGSPGSSPSASTGTGPGT | |
| | PGSGTASSSPGASPGTSSTGSPGASPGTSSTGSPGTPGSGTASSSPGTPGSGTAS | |
| | SSPGSSPSASTGTGPGTPGSGTASSSPGASPGTSSTGSPGSSTPSGATGSPGTPG | |
| | SGTASSSPGTPGSGTASSSPGSSTPSGATGSPGSSTPSGATGSPGTPGSGTASSS | |
| | PGSSPSASTGTGPGSSPSASTGTGPGASPGTSSTGSPGSSPSASTGTGPGSSPSA | |
| | STGTGPGASPGTSSTGSPGASPGTSSTGSPGTPG | |
| AG1428 | GTPGSGTASSSPGSSTPSGATGSPGASPGTSSTGSPGSSTPSGATGSPGTPGSGT | 121 |
| | ASSSPGTPGSGTASSSPGSSTPSGATGSPGSSTPSGATGSPGASPGTSSTGSPGS | |
| | SPSASTGTGPGSSTPSGATGSPGASPGTSSTGSPGSSPSASTGTGPGTPGSGTAS | |
| | SSPGASPGTSSTGSPGASPGTSSTGSPGTPGSGTASSSPGTPGSGTASSSPGASP | |
| | GTSSTGSPGASPGTSSTGSPGTPGSGTASSSPGTPGSGTASSSPGSSPSASTGTG | |
| | PGSSPSASTGTGPGASPGTSSTGSPGSSPSASTGTGPGSSPSASTGTGPGASPGT | |
| | SSTGSPGASPGTSSTGSPGTPGSGTASSSPGTPGSGTASSSPGSSPSASTGTGPG | |
| | ASPGTSSTGSPGSSTPSGATGSPGASPGTSSTGSPGSSPSASTGTGPGSSTPSGA | |
| | TGSPGSSPSASTGTGPGSSPSASTGTGPGASPGTSSTGSPGSSPSASTGTGPGSS | |
| | PSASTGTGPGASPGTSSTGSPGASPGTSSTGSPGSSPSASTGTGPGTPGSGTASS | |
| | SPGASPGTSSTGSPGSSTPSGATGSPGTPGSGTASSSPGTPGSGTASSSPGSSPS | |
| | ASTGTGPGSSTPSGATGSPGASPGTSSTGSPGASPGTSSTGSPGSSTPSGATGSP | |
| | GSSPSASTGTGPGASPGTSSTGSPGSSTPSGATGSPGTPGSGTASSSPGASPGTS | |
| | STGSPGTPGSGTASSSPGASPGTSSTGSPGSSTPSGATGSPGSSTPSGATGSPGA | |
| | SPGTSSTGSPGSSPSASTGTGPGTPGSGTASSSPGTPGSGTASSSPGSSTPSGAT | |
| | GSPGTPGSGTASSSPGASPGTSSTGSPGSSTPSGATGSPGTPGSGTASSSPGSSP | |
| | SASTGTGPGSSTPSGATGSPGSSTPSGATGSPGSSPSASTGTGPGSSTPSGATGS | |
| | PGTPGSGTASSSPGSSPSASTGTGPGTPGSGTASSSPGSSTPSGATGSPGSSPSA | |
| | STGTGPGSSPSASTGTGPGTPGSGTASSSPGASP | |
| AG1524 | GSSTPSGATGSPGTPGSGTASSSPGTPGSGTASSSPGASPGTSSTGSPGSSTPSG | 122 |
| | ATGSPGTPGSGTASSSPGSSTPSGATGSPGSSPSASTGTGPGSSTPSGATGSPGT | |
| | PGSGTASSSPGTPGSGTASSSPGSSPSASTGTGPGSSTPSGATGSPGSSPSASTG | |
| | TGPGTPGSGTASSSPGASPGTSSTGSPGSSTPSGATGSPGASPGTSSTGSPGTPG | |
| | SGTASSSPGSSTPSGATGSPGTPGSGTASSSPGSSPSASTGTGPGASPGTSSTGS | |
| | PGASPGTSSTGSPGTPGSGTASSSPGSSTPSGATGSPGSSTPSGATGSPGSSPSA | |
| | STGTGPGSSPSASTGTGPGASPGTSSTGSPGTPGSGTASSSPGTPGSGTASSSPG | |
| | SSPSASTGTGPGASPGTSSTGSPGASPGTSSTGSPGTPGSGTASSSPGSSPSAST | |
| | GTGPGASPGTSSTGSPGASPGTSSTGSPGSSTPSGATGSPGSSPSASTGTGPGSS | |
| | PSASTGTGPGTPGSGTASSSPGTPGSGTASSSPGASPGTSSTGSPGSSTPSGATG | |
| | SPGTPGSGTASSSPGASPGTSSTGSPGTPGSGTASSSPGTPGSGTASSSPGSSTP | |
| | SGATGSPGSSTPSGATGSPGTPGSGTASSSPGSSPSASTGTGPGSSTPSGATGSP | |
| | GSSTPSGATGSPGSSPSASTGTGPGTPGSGTASSSPGSSPSASTGTGPGASPGTS | |
| | STGSPGSSPSASTGTGPGTPGSGTASSSPGASPGTSSTGSPGASPGTSSTGSPGT | |
| | PGSGTASSSPGTPGSGTASSSPGSSTPSGATGSPGTPGSGTASSSPGASPGTSST | |
| | GSPGSSTPSGATGSPGSSTPSGATGSPGSSTPSGATGSPGTPGSGTASSSPGSSP | |
| | SASTGTGPGSSPSASTGTGPGSSPSASTGTGPGASPGTSSTGSPGASPGTSSTGS | |
| | PGSSPSASTGTGPGTPGSGTASSSPGASPGTSSTGSPGSSTPSGATGSPGASPGT | |
| | SSTGSPGASPGTSSTGSPGSSTPSGATGSPGTPG | |
| AG1620 | GSSTPSGATGSPGSSTPSGATGSPGTPGSGTASSSPGSSPSASTGTGPGTPGSGT | 123 |
| | ASSSPGASPGTSSTGSPGSSTPSGATGSPGASPGTSSTGSPGTPGSGTASSSPGA | |
| | SPGTSSTGSPGSSPSASTGTGPGTPGSGTASSSPGASPGTSSTGSPGSSTPSGAT | |
| | GSPGSSPSASTGTGPGSSTPSGATGSPGASPGTSSTGSPGASPGTSSTGSPGASP | |
| | GTSSTGSPGSSTPSGATGSPGASPGTSSTGSPGTPGSGTASSSPGSSTPSGATGS | |
| | PGSSTPSGATGSPGSSPSASTGTGPGSSPSASTGTGPGSSTPSGATGSPGSSPSA | |
| | STGTGPGSSPSASTGTGPGASPGTSSTGSPGASPGTSSTGSPGTPGSGTASSSPG | |
| | SSPSASTGTGPGSSPSASTGTGPGASPGTSSTGSPGSSPSASTGTGPGTPGSGTA | |
| | SSSPGSSPSASTGTGPGSSTPSGATGSPGASPGTSSTGSPGSSTPSGATGSPGTP | |
| | GSGTASSSPGSSPSASTGTGPGASPGTSSTGSPGSSTPSGATGSPGASPGTSSTG | |
| | SPGASPGTSSTGSPGTPGSGTASSSPGASPGTSSTGSPGASPGTSSTGSPGSSTP | |
| | SGATGSPGTPGSGTASSSPGSSPSASTGTGPGSSTPSGATGSPGTPGSGTASSSP | |
| | GSSTPSGATGSPGSSTPSGATGSPGSSPSASTGTGPGSSPSASTGTGPGSSTPSG | |
| | ATGSPGASPGTSSTGSPGSSPSASTGTGPGTPGSGTASSSPGASPGTSSTGSPGS | |
| | SPSASTGTGPGSSTPSGATGSPGSSPSASTGTGPGSSTPSGATGSPGSSPSASTG | |
| | TGPGTPGSGTASSSPGTPGSGTASSSPGSSTPSGATGSPGSSTPSGATGSPGTPG | |
| | SGTASSSPGSSPSASTGTGPGSSTPSGATGSPGSSPSASTGTGPGSSPSASTGTG | |
| | PGSSTPSGATGSPGASPGTSSTGSPGASPGTSSTGSPGTPGSGTASSSPGTPGSG | |
| | TASSSPGTPGSGTASSSPGSSTPSGATGSPGSST | |
| AG1716 | GASPGTSSTGSPGSSPSASTGTGPGSSTPSGATGSPGSSPSASTGTGPGTPGSGT | 124 |
| | ASSSPGSSTPSGATGSPGSSTPSGATGSPGSSPSASTGTGPGSSTPSGATGSPGT | |
| | PGSGTASSSPGSSPSASTGTGPGSSTPSGATGSPGASPGTSSTGSPGSSPSASTG | |
| | TGPGSSPSASTGTGPGTPGSGTASSSPGASPGTSSTGSPGSSTPSGATGSPGSSP | |
| | SASTGTGPGASPGTSSTGSPGSSTPSGATGSPGTPGSGTASSSPGSSPSASTGTG | |
| | PGSSPSASTGTGPGSSPSASTGTGPGTPGSGTASSSPGTPGSGTASSSPGSSTPS | |
| | GATGSPGTPGSGTASSSPGSSPSASTGTGPGASPGTSSTGSPGASPGTSSTGSP | |
| | GTPGSGTASSSPGSSPSASTGTGPGASPGTSSTGSPGTPGSGTASSSPGSSTPSG | |
| | ATGSPGSSTPSGATGSPGASPGTSSTGSPGTPGSGTASSSPGSSPSASTGTGPGT | |
| | PGSGTASSSPGASPGTSSTGSPGSSTPSGATGSPGASPGTSSTGSPGASPGTSST | |
| | GSPGTPGSGTASSSPGTPGSGTASSSPGSSPSASTGTGPGSSPSASTGTGPGSSP | |
| | SASTGTGPGTPGSGTASSSPGASPGTSSTGSPGSSTPSGATGSPGASPGTSSTGS | |
| | PGSSPSASTGTGPGASPGTSSTGSPGSSPSASTGTGPGASPGTSSTGSPGSSPSA | |
| | STGTGPGSSPSASTGTGPGTPGSGTASSSPGASPGTSSTGSPGTPGSGTASSSPG | |
| | TPGSGTASSSPGASPGTSSTGSPGSSTPSGATGSPGSSTPSGATGSPGSSPSAST | |
| | GTGPGSSTPSGATGSPGTPGSGTASSSPGSSPSASTGTGPGSSTPSGATGSPGSS | |
| | TPSGATGSPGSSPSASTGTGPGSSPSASTGTGPGASPGTSSTGSPGTPGSGTASS | |
| | SPGSSPSASTGTGPGSSTPSGATGSPGASPGTSSTGSPGASPGTSSTGSPGSSPS | |
| | ASTGTGPGASPGTSSTGSPGASPGTSSTGSPGTPG | |
| AG1812 | GSSTPSGATGSPGSSPSASTGTGPGASPGTSSTGSPGASPGTSSTGSPGTPGSGT | 125 |
| | ASSSPGSSPSASTGTGPGASPGTSSTGSPGSSTPSGATGSPGSSTPSGATGSPGA | |
| | SPGTSSTGSPGSSPSASTGTGPGTPGSGTASSSPGTPGSGTASSSPGASPGTSST | |
| | GSPGSSTPSGATGSPGSSTPSGATGSPGSSPSASTGTGPGTPGSGTASSSPGASP | |
| | GTSSTGSPGSSTPSGATGSPGTPGSGTASSSPGSSPSASTGTGPGSSTPSGATGS | |
| | PGTPGSGTASSSPGSSPSASTGTGPGTPGSGTASSSPGASPGTSSTGSPGSSTPS | |
| | GATGSPGSSTPSGATGSPGTPGSGTASSSPGSSTPSGATGSPGSSTPSGATGSP | |
| | GASPGTSSTGSPGASPGTSSTGSPGASPGTSSTGSPGSSTPSGATGSPGTPGSGT | |
| | ASSSPGSSPSASTGTGPGTPGSGTASSSPGASPGTSSTGSPGTPGSGTASSSPGA | |
| | SPGTSSTGSPGSSTPSGATGSPGSSPSASTGTGPGSSPSASTGTGPGTPGSGTAS | |
| | SSPGASPGTSSTGSPGASPGTSSTGSPGTPGSGTASSSPGASPGTSSTGSPGSST | |
| | PSGATGSPGSSTPSGATGSPGSSPSASTGTGPGASPGTSSTGSPGASPGTSSTGS | |
| | PGTPGSGTASSSPGTPGSGTASSSPGSSTPSGATGSPGSSPSASTGTGPGSSPSA | |
| | STGTGPGASPGTSSTGSPGASPGTSSTGSPGSSTPSGATGSPGSSPSASTGTGPG | |
| | ASPGTSSTGSPGSSTPSGATGSPGTPGSGTASSSPGSSPSASTGTGPGASPGTSS | |
| | TGSPGSSTPSGATGSPGTPGSGTASSSPGSSTPSGATGSPGSSTPSGATGSPGSS | |
| | TPSGATGSPGSSPSASTGTGPGSSPSASTGTGPGSSTPSGATGSPGSSPSASTGT | |
| | GPGSSPSASTGTGPGSSTPSGATGSPGASPGTSSTGSPGASPGTSSTGSPGTPGS | |
| | GTASSSPGASPGTSSTGSPGSSTPSGATGSPGASP | |
| AG1908 | GSSPSASTGTGPGSSPSASTGTGPGSSPSASTGTGPGTPGSGTASSSPGSSPSAS | 126 |
| | TGTGPGSSPSASTGTGPGASPGTSSTGSPGSSPSASTGTGPGTPGSGTASSSPGT | |
| | PGSGTASSSPGASPGTSSTGSPGTPGSGTASSSPGTPGSGTASSSPGSSPSASTG | |
| | TGPGSSTPSGATGSPGSSPSASTGTGPGASPGTSSTGSPGSSPSASTGTGPGASP | |
| | GTSSTGSPGASPGTSSTGSPGTPGSGTASSSPGTPGSGTASSSPGASPGTSSTGS | |
| | PGTPGSGTASSSPGTPGSGTASSSPGSSPSASTGTGPGSSTPSGATGSPGASPGT | |
| | SSTGSPGSSTPSGATGSPGSSPSASTGTGPGSSPSASTGTGPGSSTPSGATGSPG | |
| | ASPGTSSTGSPGSSPSASTGTGPGTPGSGTASSSPGASPGTSSTGSPGASPGTSS | |
| | TGSPGTPGSGTASSSPGTPGSGTASSSPGSSTPSGATGSPGTPGSGTASSSPGAS | |
| | PGTSSTGSPGSSTPSGATGSPGTPGSGTASSSPGSSPSASTGTGPGSSPSASTGT | |
| | GPGSSTPSGATGSPGASPGTSSTGSPGASPGTSSTGSPGTPGSGTASSSPGTPGS | |
| | GTASSSPGSSTPSGATGSPGSSPSASTGTGPGSSPSASTGTGPGASPGTSSTGSP | |
| | GASPGTSSTGSPGSSTPSGATGSPGASPGTSSTGSPGASPGTSSTGSPGTPGSGT | |
| | ASSSPGTPGSGTASSSPGTPGSGTASSSPGSSTPSGATGSPGSSTPSGATGSPGS | |
| | SPSASTGTGPGSSPSASTGTGPGSSTPSGATGSPGTPGSGTASSSPGSSPSASTG | |
| | TGPGASPGTSSTGSPGSSTPSGATGSPGSSPSASTGTGPGSSTPSGATGSPGASP | |
| | GTSSTGSPGSSPSASTGTGPGTPGSGTASSSPGSSPSASTGTGPGSSTPSGATGS | |
| | PGASPGTSSTGSPGSSPSASTGTGPGTPGSGTASSSPGSSTPSGATGSPGSSTPS | |
| | GATGSPGASPGTSSTGSPGSSPSASTGTGPGSSP | |
| AG2004A | GSSPSASTGTGPGTPGSGTASSSPGSSTPSGATGSPGTPGSGTASSSPGSSTPSG | 127 |
| | ATGSPGSSTPSGATGSPGSSPSASTGTGPGSSPSASTGTGPGSSPSASTGTGPGT | |
| | PGSGTASSSPGASPGTSSTGSPGSSTPSGATGSPGTPGSGTASSSPGTPGSGTAS | |
| | SSPGSSTPSGATGSPGSSTPSGATGSPGSSPSASTGTGPGASPGTSSTGSPGASP | |
| | GTSSTGSPGASPGTSSTGSPGASPGTSSTGSPGTPGSGTASSSPGTPGSGTASSS | |
| | PGSSPSASTGTGPGSSTPSGATGSPGASPGTSSTGSPGSSTPSGATGSPGSSTPS | |
| | GATGSPGSSPSASTGTGPGASPGTSSTGSPGTPGSGTASSSPGSSPSASTGTGPG | |
| | SSPSASTGTGPGASPGTSSTGSPGASPGTSSTGSPGTPGSGTASSSPGASPGTSS | |
| | TGSPGTPGSGTASSSPGTPGSGTASSSPGSSTPSGATGSPGTPGSGTASSSPGAS | |
| | PGTSSTGSPGSSTPSGATGSPGSSTPSGATGSPGSSPSASTGTGPGSSTPSGATG | |
| | SPGSSTPSGATGSPGASPGTSSTGSPGSSPSASTGTGPGTPGSGTASSSPGASPG | |
| | TSSTGSPGSSPSASTGTGPGTPGSGTASSSPGSSPSASTGTGPGTPGSGTASSSP | |
| | GASPGTSSTGSPGASPGTSSTGSPGTPGSGTASSSPGTPGSGTASSSPGSSTPSG | |
| | ATGSPGSSTPSGATGSPGTPGSGTASSSPGSSTPSGATGSPGSSTPSGATGSPGA | |
| | SPGTSSTGSPGSSPSASTGTGPGSSTPSGATGSPGSSPSASTGTGPGSSPSASTG | |
| | TGPGASPGTSSTGSPGSSTPSGATGSPGASPGTSSTGSPGTPGSGTASSSPGTPG | |
| | SGTASSSPGSSPSASTGTGPGASPGTSSTGSPGSSTPSGATGSPGSSPSASTGTG | |
| | PGSSPSASTGTGPGASPGTSSTGSPGTPGSGTASSSPGSSTPSGATGSPGTPGSG | |
| | TASSSPGSSPSASTGTGPGSSPSASTGTGPGASP | |
| AE72B | SPAGSPTSTEEGSPAGSPTSTEEGTSESATPESGPGTSTEPSEGSAPGTSESATP | 128 |
| | ESGPGSEPATSGSETPG | |
| AE72C | TSESATPESGPGTSESATPESGPGSEPATSGSETPGSEPATSGSETPGSPAGSPT | 129 |
| | STEEGTSTEPSEGSAPG | |
| AE108A | TEEGTSESATPESGPGTSTEPSEGSAPGSPAGSPTSTEEGTSTEPSEGSAPGTST | 130 |
| | EPSEGSAPGTSESATPESGPGSEPATSGSETPGSEPATSGSETPGSPAGSPTS | |
| AE108B | GSPAGSPTSTEEGTSTEPSEGSAPGTSESATPESGPGTSESATPESGPGTSESAT | 131 |
| | PESGPGSEPATSGSETPGSEPATSGSETPGSPAGSPTSTEEGTSTEPSEGSAP | |
| AE144A | STEPSEGSAPGSPAGSPTSTEEGTSTEPSEGSAPGTSESATPESGPGSEPATSGS | 132 |
| | ETPGTSESATPESGPGSEPATSGSETPGTSESATPESGPGTSTEPSEGSAPGTSE | |
| | SATPESGPGSPAGSPTSTEEGSPAGSPTSTEEGS | |
| AE144B | SEPATSGSETPGTSESATPESGPGSEPATSGSETPGTSESATPESGPGTSTEPSE | 133 |
| | GSAPGSPAGSPTSTEEGTSESATPESGPGSEPATSGSETPGTSESATPESGPGSP | |
| | AGSPTSTEEGSPAGSPTSTEEGTSTEPSEGSAPG | |
| AE180A | TSTEEGTSESATPESGPGSEPATSGSETPGTSESATPESGPGSPAGSPTSTEEGS | 134 |
| | PAGSPTSTEEGTSTEPSEGSAPGTSESATPESGPGTSESATPESGPGTSESATPE | |
| | SGPGSEPATSGSETPGSEPATSGSETPGSPAGSPTSTEEGTSTEPSEGSAPGTST | |
| | EPSEGSAPGSEPATS | |
| AE216A | PESGPGTSTEPSEGSAPGSPAGSPTSTEEGTSESATPESGPGSEPATSGSETPGT | 135 |
| | SESATPESGPGSPAGSPTSTEEGSPAGSPTSTEEGTSTEPSEGSAPGTSESATPE | |
| | SGPGTSESATPESGPGTSESATPESGPGSEPATSGSETPGSEPATSGSETPGSPA | |
| | GSPTSTEEGTSTEPSEGSAPGTSTEPSEGSAPGSEPATSGSETPGTSESAT | |
| AE252A | ESGPGSEPATSGSETPGTSESATPESGPGTSTEPSEGSAPGSPAGSPTSTEEGTS | 136 |
| | ESATPESGPGSEPATSGSETPGTSESATPESGPGSPAGSPTSTEEGSPAGSPTST | |
| | EEGTSTEPSEGSAPGTSESATPESGPGTSESATPESGPGTSESATPESGPGSEPA | |
| | TSGSETPGSEPATSGSETPGSPAGSPTSTEEGTSTEPSEGSAPGTSTEPSEGSAP | |
| | GSEPATSGSETPGTSESATPESGPGTSTEPSE | |
| AE288A | TPESGPGTSTEPSEGSAPGTSESATPESGPGSEPATSGSETPGTSESATPESGPG | 137 |
| | SEPATSGSETPGTSESATPESGPGTSTEPSEGSAPGSPAGSPTSTEEGTSESATP | |
| | ESGPGSEPATSGSETPGTSESATPESGPGSPAGSPTSTEEGSPAGSPTSTEEGTS | |
| | TEPSEGSAPGTSESATPESGPGTSESATPESGPGTSESATPESGPGSEPATSGSE | |
| | TPGSEPATSGSETPGSPAGSPTSTEEGTSTEPSEGSAPGTSTEPSEGSAPGSEPA | |
| | TSGSETPGTSESA | |
| AE324A | PESGPGSPAGSPTSTEEGSPAGSPTSTEEGSPAGSPTSTEEGTSESATPESGPGT | 138 |
| | STEPSEGSAPGTSESATPESGPGSEPATSGSETPGTSESATPESGPGSEPATSGS | |
| | ETPGTSESATPESGPGTSTEPSEGSAPGSPAGSPTSTEEGTSESATPESGPGSEP | |
| | ATSGSETPGTSESATPESGPGSPAGSPTSTEEGSPAGSPTSTEEGTSTEPSEGSA | |
| | PGTSESATPESGPGTSESATPESGPGTSESATPESGPGSEPATSGSETPGSEPAT | |
| | SGSETPGSPAGSPTSTEEGTSTEPSEGSAPGTSTEPSEGSAPGSEPATS | |
| AE360A | PESGPGTSTEPSEGSAPGTSESATPESGPGSPAGSPTSTEEGSPAGSPTSTEEGS | 139 |
| | PAGSPTSTEEGTSESATPESGPGTSTEPSEGSAPGTSESATPESGPGSEPATSGS | |
| | ETPGTSESATPESGPGSEPATSGSETPGTSESATPESGPGTSTEPSEGSAPGSPA | |
| | GSPTSTEEGTSESATPESGPGSEPATSGSETPGTSESATPESGPGSPAGSPTSTE | |
| | EGSPAGSPTSTEEGTSTEPSEGSAPGTSESATPESGPGTSESATPESGPGTSESA | |
| | TPESGPGSEPATSGSETPGSEPATSGSETPGSPAGSPTSTEEGTSTEPSEGSAPG | |
| | TSTEPSEGSAPGSEPATSGSETPGTSESAT | |
| AE396A | PESGPGSEPATSGSETPGTSESATPESGPGTSTEPSEGSAPGTSESATPESGPGS | 140 |
| | PAGSPTSTEEGSPAGSPTSTEEGSPAGSPTSTEEGTSESATPESGPGTSTEPSEG | |
| | SAPGTSESATPESGPGSEPATSGSETPGTSESATPESGPGSEPATSGSETPGTSE | |
| | SATPESGPGTSTEPSEGSAPGSPAGSPTSTEEGTSESATPESGPGSEPATSGSET | |
| | PGTSESATPESGPGSPAGSPTSTEEGSPAGSPTSTEEGTSTEPSEGSAPGTSESA | |
| | TPESGPGTSESATPESGPGTSESATPESGPGSEPATSGSETPGSEPATSGSETPG | |
| | SPAGSPTSTEEGTSTEPSEGSAPGTSTEPS | |
| AE432A | EGSAPGSPAGSPTSTEEGTSTEPSEGSAPGTSESATPESGPGSEPATSGSETPGT | 141 |
| | SESATPESGPGSEPATSGSETPGTSESATPESGPGTSTEPSEGSAPGTSESATPE | |
| | SGPGSPAGSPTSTEEGSPAGSPTSTEEGSPAGSPTSTEEGTSESATPESGPGTST | |
| | EPSEGSAPGTSESATPESGPGSEPATSGSETPGTSESATPESGPGSEPATSGSET | |
| | PGTSESATPESGPGTSTEPSEGSAPGSPAGSPTSTEEGTSESATPESGPGSEPAT | |
| | SGSETPGTSESATPESGPGSPAGSPTSTEEGSPAGSPTSTEEGTSTEPSEGSAPG | |
| | TSESATPESGPGTSESATPESGPGTSESATPESGPGSEPATSGSETPGSEPATSG | |
| | SETPGSPAGSPTSTEEGTSTEPSEGSAPGTSTEPSEGSAPGSEPATS | |
| AE468A | EGSAPGTSTEPSEGSAPGTSTEPSEGSAPGSPAGSPTSTEEGTSTEPSEGSAPGT | 142 |
| | SESATPESGPGSEPATSGSETPGTSESATPESGPGSEPATSGSETPGTSESATPE | |
| | SGPGTSTEPSEGSAPGTSESATPESGPGSPAGSPTSTEEGSPAGSPTSTEEGSPA | |
| | GSPTSTEEGTSESATPESGPGTSTEPSEGSAPGTSESATPESGPGSEPATSGSET | |
| | PGTSESATPESGPGSEPATSGSETPGTSESATPESGPGTSTEPSEGSAPGSPAGS | |
| | PTSTEEGTSESATPESGPGSEPATSGSETPGTSESATPESGPGSPAGSPTSTEEG | |
| | SPAGSPTSTEEGTSTEPSEGSAPGTSESATPESGPGTSESATPESGPGTSESATP | |
| | ESGPGSEPATSGSETPGSEPATSGSETPGSPAGSPTSTEEGTSTEPSEGSAPGTS | |
| | TEPSEGSAPGSEPATSGSETPGTSESAT | |
| AE504A | EGSAPGTSTEPSEGSAPGTSTEPSEGSAPGTSTEPSEGSAPGTSTEPSEGSAPGS | 143 |
| | PAGSPTSTEEGTSTEPSEGSAPGTSESATPESGPGSEPATSGSETPGTSESATPE | |
| | SGPGSEPATSGSETPGTSESATPESGPGTSTEPSEGSAPGTSESATPESGPGSPA | |
| | GSPTSTEEGSPAGSPTSTEEGSPAGSPTSTEEGTSESATPESGPGTSTEPSEGSA | |
| | PGTSESATPESGPGSEPATSGSETPGTSESATPESGPGSEPATSGSETPGTSESA | |
| | TPESGPGTSTEPSEGSAPGSPAGSPTSTEEGTSESATPESGPGSEPATSGSETPG | |
| | TSESATPESGPGSPAGSPTSTEEGSPAGSPTSTEEGTSTEPSEGSAPGTSESATP | |
| | ESGPGTSESATPESGPGTSESATPESGPGSEPATSGSETPGSEPATSGSETPGSP | |
| | AGSPTSTEEGTSTEPSEGSAPGTSTEPSEGSAPGSEPATSGSETPGTSESATPES | |
| | GPGTSTEPS | |
| AE540A | TPESGPGSPAGSPTSTEEGTSESATPESGPGSEPATSGSETPGTSESATPESGPG | 144 |
| | TSTEPSEGSAPGTSTEPSEGSAPGTSTEPSEGSAPGTSTEPSEGSAPGTSTEPSE | |
| | GSAPGTSTEPSEGSAPGSPAGSPTSTEEGTSTEPSEGSAPGTSESATPESGPGSE | |
| | PATSGSETPGTSESATPESGPGSEPATSGSETPGTSESATPESGPGTSTEPSEGS | |
| | APGTSESATPESGPGSPAGSPTSTEEGSPAGSPTSTEEGSPAGSPTSTEEGTSES | |
| | ATPESGPGTSTEPSEGSAPGTSESATPESGPGSEPATSGSETPGTSESATPESGP | |
| | GSEPATSGSETPGTSESATPESGPGTSTEPSEGSAPGSPAGSPTSTEEGTSESAT | |
| | PESGPGSEPATSGSETPGTSESATPESGPGSPAGSPTSTEEGSPAGSPTSTEEGT | |
| | STEPSEGSAPGTSESATPESGPGTSESATPESGPGTSESATPESGPGSEPATSGS | |
| | ETPGSEPATSGSETPGSPAGSPTSTEEGTSTEPSEGSAPGTSTEP | |
| AE576A | TPESGPGTSESATPESGPGSPAGSPTSTEEGTSESATPESGPGSEPATSGSETPG | 145 |
| | TSESATPESGPGTSTEPSEGSAPGTSTEPSEGSAPGTSTEPSEGSAPGTSTEPSE | |
| | GSAPGTSTEPSEGSAPGTSTEPSEGSAPGSPAGSPTSTEEGTSTEPSEGSAPGTS | |
| | ESATPESGPGSEPATSGSETPGTSESATPESGPGSEPATSGSETPGTSESATPES | |
| | GPGTSTEPSEGSAPGTSESATPESGPGSPAGSPTSTEEGSPAGSPTSTEEGSPAG | |
| | SPTSTEEGTSESATPESGPGTSTEPSEGSAPGTSESATPESGPGSEPATSGSETP | |
| | GTSESATPESGPGSEPATSGSETPGTSESATPESGPGTSTEPSEGSAPGSPAGSP | |
| | TSTEEGTSESATPESGPGSEPATSGSETPGTSESATPESGPGSPAGSPTSTEEGS | |
| | PAGSPTSTEEGTSTEPSEGSAPGTSESATPESGPGTSESATPESGPGTSESATPE | |
| | SGPGSEPATSGSETPGSEPATSGSETPGSPAGSPTSTEEGTSTEPSEGSAPGTST | |
| | EPSEGSAPGSEPATSGSETPGTSESA | |
| AE612A | GSETPGTSTEPSEGSAPGTSTEPSEGSAPGTSESATPESGPGTSESATPESGPGS | 146 |
| | PAGSPTSTEEGTSESATPESGPGSEPATSGSETPGTSESATPESGPGTSTEPSEG | |
| | SAPGTSTEPSEGSAPGTSTEPSEGSAPGTSTEPSEGSAPGTSTEPSEGSAPGTST | |
| | EPSEGSAPGSPAGSPTSTEEGTSTEPSEGSAPGTSESATPESGPGSEPATSGSET | |
| | PGTSESATPESGPGSEPATSGSETPGTSESATPESGPGTSTEPSEGSAPGTSESA | |
| | TPESGPGSPAGSPTSTEEGSPAGSPTSTEEGSPAGSPTSTEEGTSESATPESGPG | |
| | TSTEPSEGSAPGTSESATPESGPGSEPATSGSETPGTSESATPESGPGSEPATSG | |
| | SETPGTSESATPESGPGTSTEPSEGSAPGSPAGSPTSTEEGTSESATPESGPGSE | |
| | PATSGSETPGTSESATPESGPGSPAGSPTSTEEGSPAGSPTSTEEGTSTEPSEGS | |
| | APGTSESATPESGPGTSESATPESGPGTSESATPESGPGSEPATSGSETPGSEPA | |
| | TSGSETPGSPAGSPTSTEEGTSTEPSEGSAPGTSTEPSEGSAPGSEPATSGSETP | |
| | GTSESAT | |

| | | |
|---|---|---|
| AE648A | PESGPGTSTEPSEGSAPGTSESATPESGPGSEPATSGSETPGTSTEPSEGSAPGT | 147 |
| | STEPSEGSAPGTSESATPESGPGTSESATPESGPGSPAGSPTSTEEGTSESATPE | |
| | SGPGSEPATSGSETPGTSESATPESGPGTSTEPSEGSAPGTSTEPSEGSAPGTST | |
| | EPSEGSAPGTSTEPSEGSAPGTSTEPSEGSAPGTSTEPSEGSAPGSPAGSPTSTE | |
| | EGTSTEPSEGSAPGTSESATPESGPGSEPATSGSETPGTSESATPESGPGSEPAT | |
| | SGSETPGTSESATPESGPGTSTEPSEGSAPGTSESATPESGPGSPAGSPTSTEEG | |
| | SPAGSPTSTEEGSPAGSPTSTEEGTSESATPESGPGTSTEPSEGSAPGTSESATP | |
| | ESGPGSEPATSGSETPGTSESATPESGPGSEPATSGSETPGTSESATPESGPGTS | |
| | TEPSEGSAPGSPAGSPTSTEEGTSESATPESGPGSEPATSGSETPGTSESATPES | |
| | GPGSPAGSPTSTEEGSPAGSPTSTEEGTSTEPSEGSAPGTSESATPESGPGTSES | |
| | ATPESGPGTSESATPESGPGSEPATSGSETPGSEPATSGSETPGSPAGSPTSTEE | |
| | GTSTEPSEGSAPGTSTEPSEGSAPGSEPATSGSETPGTSESAT | |
| AE684A | EGSAPGSPAGSPTSTEEGTSTEPSEGSAPGTSTEPSEGSAPGTSESATPESGPGT | 148 |
| | STEPSEGSAPGTSESATPESGPGSEPATSGSETPGTSTEPSEGSAPGTSTEPSEG | |
| | SAPGTSESATPESGPGTSESATPESGPGSPAGSPTSTEEGTSESATPESGPGSEP | |
| | ATSGSETPGTSESATPESGPGTSTEPSEGSAPGTSTEPSEGSAPGTSTEPSEGSA | |
| | PGTSTEPSEGSAPGTSTEPSEGSAPGTSTEPSEGSAPGSPAGSPTSTEEGTSTEP | |
| | SEGSAPGTSESATPESGPGSEPATSGSETPGTSESATPESGPGSEPATSGSETPG | |
| | TSESATPESGPGTSTEPSEGSAPGTSESATPESGPGSPAGSPTSTEEGSPAGSPT | |
| | STEEGSPAGSPTSTEEGTSESATPESGPGTSTEPSEGSAPGTSESATPESGPGSE | |
| | PATSGSETPGTSESATPESGPGSEPATSGSETPGTSESATPESGPGTSTEPSEGS | |
| | APGSPAGSPTSTEEGTSESATPESGPGSEPATSGSETPGTSESATPESGPGSPAG | |
| | SPTSTEEGSPAGSPTSTEEGTSTEPSEGSAPGTSESATPESGPGTSESATPESGP | |
| | GTSESATPESGPGSEPATSGSETPGSEPATSGSETPGSPAGSPTSTEEGTSTEPS | |
| | EGSAPGTSTEPSEGSAPGSEPATS | |
| AE720A | TSGSETPGSEPATSGSETPGSPAGSPTSTEEGTSESATPESGPGTSTEPSEGSAP | 149 |
| | GTSTEPSEGSAPGSPAGSPTSTEEGTSTEPSEGSAPGTSTEPSEGSAPGTSESAT | |
| | PESGPGTSTEPSEGSAPGTSESATPESGPGSEPATSGSETPGTSTEPSEGSAPGT | |
| | STEPSEGSAPGTSESATPESGPGTSESATPESGPGSPAGSPTSTEEGTSESATPE | |
| | SGPGSEPATSGSETPGTSESATPESGPGTSTEPSEGSAPGTSTEPSEGSAPGTST | |
| | EPSEGSAPGTSTEPSEGSAPGTSTEPSEGSAPGTSTEPSEGSAPGSPAGSPTSTE | |
| | EGTSTEPSEGSAPGTSESATPESGPGSEPATSGSETPGTSESATPESGPGSEPAT | |
| | SGSETPGTSESATPESGPGTSTEPSEGSAPGTSESATPESGPGSPAGSPTSTEEG | |
| | SPAGSPTSTEEGSPAGSPTSTEEGTSESATPESGPGTSTEPSEGSAPGTSESATP | |
| | ESGPGSEPATSGSETPGTSESATPESGPGSEPATSGSETPGTSESATPESGPGTS | |
| | TEPSEGSAPGSPAGSPTSTEEGTSESATPESGPGSEPATSGSETPGTSESATPES | |
| | GPGSPAGSPTSTEEGSPAGSPTSTEEGTSTEPSEGSAPGTSESATPESGPGTSES | |
| | ATPESGPGTSESATPESGPGSEPATSGSETPGSEPATSGSETPGSPAGSPTSTEE | |
| | GTSTE | |
| AE756A | TSGSETPGSEPATSGSETPGSPAGSPTSTEEGTSESATPESGPGTSTEPSEGSAP | 150 |
| | GTSTEPSEGSAPGSPAGSPTSTEEGTSTEPSEGSAPGTSTEPSEGSAPGTSESAT | |
| | PESGPGTSTEPSEGSAPGTSESATPESGPGSEPATSGSETPGTSTEPSEGSAPGT | |
| | STEPSEGSAPGTSESATPESGPGTSESATPESGPGSPAGSPTSTEEGTSESATPE | |
| | SGPGSEPATSGSETPGTSESATPESGPGTSTEPSEGSAPGTSTEPSEGSAPGTST | |
| | EPSEGSAPGTSTEPSEGSAPGTSTEPSEGSAPGTSTEPSEGSAPGSPAGSPTSTE | |
| | EGTSTEPSEGSAPGTSESATPESGPGSEPATSGSETPGTSESATPESGPGSEPAT | |
| | SGSETPGTSESATPESGPGTSTEPSEGSAPGTSESATPESGPGSPAGSPTSTEEG | |
| | SPAGSPTSTEEGSPAGSPTSTEEGTSESATPESGPGTSTEPSEGSAPGTSESATP | |
| | ESGPGSEPATSGSETPGTSESATPESGPGSEPATSGSETPGTSESATPESGPGTS | |
| | TEPSEGSAPGSPAGSPTSTEEGTSESATPESGPGSEPATSGSETPGTSESATPES | |
| | GPGSPAGSPTSTEEGSPAGSPTSTEEGTSTEPSEGSAPGTSESATPESGPGTSES | |
| | ATPESGPGTSESATPESGPGSEPATSGSETPGSEPATSGSETPGSPAGSPTSTEE | |
| | GTSTEPSEGSAPGTSTEPSEGSAPGSEPATSGSETPGTSES | |
| AE792A | EGSAPGTSESATPESGPGSEPATSGSETPGSEPATSGSETPGSPAGSPTSTEEGT | 151 |
| | SESATPESGPGTSTEPSEGSAPGTSTEPSEGSAPGSPAGSPTSTEEGTSTEPSEG | |
| | SAPGTSTEPSEGSAPGTSESATPESGPGTSTEPSEGSAPGTSESATPESGPGSEP | |
| | ATSGSETPGTSTEPSEGSAPGTSTEPSEGSAPGTSESATPESGPGTSESATPESG | |
| | PGSPAGSPTSTEEGTSESATPESGPGSEPATSGSETPGTSESATPESGPGTSTEP | |
| | SEGSAPGTSTEPSEGSAPGTSTEPSEGSAPGTSTEPSEGSAPGTSTEPSEGSAPG | |
| | TSTEPSEGSAPGSPAGSPTSTEEGTSTEPSEGSAPGTSESATPESGPGSEPATSG | |
| | SETPGTSESATPESGPGSEPATSGSETPGTSESATPESGPGTSTEPSEGSAPGTS | |
| | ESATPESGPGSPAGSPTSTEEGSPAGSPTSTEEGSPAGSPTSTEEGTSESATPES | |
| | GPGTSTEPSEGSAPGTSESATPESGPGSEPATSGSETPGTSESATPESGPGSEPA | |
| | TSGSETPGTSESATPESGPGTSTEPSEGSAPGSPAGSPTSTEEGTSESATPESGP | |
| | GSEPATSGSETPGTSESATPESGPGSPAGSPTSTEEGSPAGSPTSTEEGTSTEPS | |
| | EGSAPGTSESATPESGPGTSESATPESGPGTSESATPESGPGSEPATSGSETPGS | |
| | EPATSGSETPGSPAGSPTSTEEGTSTEPSEGSAPGTSTEPSEGSAPGSEPATSGS | |
| | ETPGTSESATPESGPGTSTEPS | |
| AE828A | PESGPGTSTEPSEGSAPGSPAGSPTSTEEGTSTEPSEGSAPGTSTEPSEGSAPGT | 152 |
| | SESATPESGPGSEPATSGSETPGSEPATSGSETPGSPAGSPTSTEEGTSESATPE | |
| | SGPGTSTEPSEGSAPGTSTEPSEGSAPGSPAGSPTSTEEGTSTEPSEGSAPGTST | |
| | EPSEGSAPGTSESATPESGPGTSTEPSEGSAPGTSESATPESGPGSEPATSGSET | |
| | PGTSTEPSEGSAPGTSTEPSEGSAPGTSESATPESGPGTSESATPESGPGSPAGS | |
| | PTSTEEGTSESATPESGPGSEPATSGSETPGTSESATPESGPGTSTEPSEGSAPG | |
| | TSTEPSEGSAPGTSTEPSEGSAPGTSTEPSEGSAPGTSTEPSEGSAPGTSTEPSE | |
| | GSAPGSPAGSPTSTEEGTSTEPSEGSAPGTSESATPESGPGSEPATSGSETPGTS | |
| | ESATPESGPGSEPATSGSETPGTSESATPESGPGTSTEPSEGSAPGTSESATPES | |
| | GPGSPAGSPTSTEEGSPAGSPTSTEEGSPAGSPTSTEEGTSESATPESGPGTSTE | |
| | PSEGSAPGTSESATPESGPGSEPATSGSETPGTSESATPESGPGSEPATSGSETP | |
| | GTSESATPESGPGTSTEPSEGSAPGSPAGSPTSTEEGTSESATPESGPGSEPATS | |
| | GSETPGTSESATPESGPGSPAGSPTSTEEGSPAGSPTSTEEGTSTEPSEGSAPGT | |
| | SESATPESGPGTSESATPESGPGTSESATPESGPGSEPATSGSETPGSEPATSGS | |
| | ETPGSPAGSPTSTEEGTSTEPSEGSAPGTSTEPSEGSAPGSEPATSGSETPGTSE | |
| | SAT | |
| AG72A | GPGSSPSASTGTGPGTPGSGTASSSPGSSTPSGATGSPGSSPSASTGTGPGASPG | 153 |
| | TSSTGSPGTPGSGTASS | |
| AG72B | GSSTPSGATGSPGSSTPSGATGSPGSSPSASTGTGPGSSPSASTGTGPGASPGTS | 154 |
| | STGSPGTPGSGTASSSP | |
| AG72C | SPSASTGTGPGASPGTSSTGSPGSSPSASTGTGPGTPGSGTASSSPGSSTPSGAT | 155 |
| | GSPGSSTPSGATGSPGA | |
| AG108A | SASTGTGPGSSPSASTGTGPGTPGSGTASSSPGSSTPSGATGSPGSSPSASTGTG | 156 |
| | PGASPGTSSTGSPGTPGSGTASSSPGSSTPSGATGSPGTPGSGTASSSPGASP | |
| AG108B | PGTPGSGTASSSPGSSTPSGATGSPGTPGSGTASSSPGSSTPSGATGSPGSSTPS | 157 |
| | GATGSPGSSPSASTGTGPGSSPSASTGTGPGASPGTSSTGSPGTPGSGTASSS | |
| AG144A | PGSSPSASTGTGPGSSPSASTGTGPGTPGSGTASSSPGSSTPSGATGSPGSSPSA | 158 |
| | STGTGPGASPGTSSTGSPGTPGSGTASSSPGSSTPSGATGSPGTPGSGTASSSPG | |
| | ASPGTSSTGSPGASPGTSSTGSPGTPGSGTASSS | |
| AG144B | PSGATGSPGTPGSGTASSSPGSSTPSGATGSPGSSTPSGATGSPGSSPSASTGTG | 159 |
| | PGSSPSASTGTGPGASPGTSSTGSPGTPGSGTASSSPGSSTPSGATGSPGSSPSA | |
| | STGTGPGSSPSASTGTGPGASPGTSSTGSPGASP | |
| AG180A | TSSTGSPGSSPSASTGTGPGSSPSASTGTGPGTPGSGTASSSPGSSTPSGATGSP | 160 |
| | GSSPSASTGTGPGASPGTSSTGSPGTPGSGTASSSPGSSTPSGATGSPGTPGSGT | |
| | ASSSPGASPGTSSTGSPGASPGTSSTGSPGTPGSGTASSSPGSSTPSGATGSPGA | |
| | SPGTSSTGSPGTPGS | |
| AG216A | TGTGPGSSPSASTGTGPGTPGSGTASSSPGSSTPSGATGSPGSSPSASTGTGPGA | 161 |
| | SPGTSSTGSPGTPGSGTASSSPGSSTPSGATGSPGTPGSGTASSSPGASPGTSST | |
| | GSPGASPGTSSTGSPGTPGSGTASSSPGSSTPSGATGSPGASPGTSSTGSPGTPG | |
| | SGTASSSPGSSTPSGATGSPGSSPSASTGTGPGSSPSASTGTGPGSSTPSG | |
| AG252A | TSSTGSPGSSPSASTGTGPGSSPSASTGTGPGTPGSGTASSSPGSSTPSGATGSP | 162 |
| | GSSPSASTGTGPGASPGTSSTGSPGTPGSGTASSSPGSSTPSGATGSPGTPGSGT | |
| | ASSSPGASPGTSSTGSPGASPGTSSTGSPGTPGSGTASSSPGSSTPSGATGSPGA | |
| | SPGTSSTGSPGTPGSGTASSSPGSSTPSGATGSPGSSPSASTGTGPGSSPSASTG | |
| | TGPGSSTPSGATGSPGSSTPSGATGSPGASPG | |
| AG288A | TSSTGSPGSSPSASTGTGPGSSPSASTGTGPGTPGSGTASSSPGSSTPSGATGSP | 163 |
| | GSSPSASTGTGPGASPGTSSTGSPGTPGSGTASSSPGSSTPSGATGSPGTPGSGT | |
| | ASSSPGASPGTSSTGSPGASPGTSSTGSPGTPGSGTASSSPGSSTPSGATGSPGA | |
| | SPGTSSTGSPGTPGSGTASSSPGSSTPSGATGSPGSSPSASTGTGPGSSPSASTG | |
| | TGPGSSTPSGATGSPGSSTPSGATGSPGASPGTSSTGSPGASPGTSSTGSPGASP | |
| | GTSSTGSPGTPGS | |
| AG324A | TSSTGSPGTPGSGTASSSPGASPGTSSTGSPGASPGTSSTGSPGASPGTSSTGSP | 164 |
| | GASPGTSSTGSPGTPGSGTASSSPGSSTPSGATGSPGTPGSGTASSSPGSSTPSG | |
| | ATGSPGTPGSGTASSSPGSSTPSGATGSPGSSTPSGATGSPGSSPSASTGTGPGS | |
| | SPSASTGTGPGASPGTSSTGSPGTPGSGTASSSPGSSTPSGATGSPGSSPSASTG | |
| | TGPGSSPSASTGTGPGASPGTSSTGSPGASPGTSSTGSPGSSTPSGATGSPGSSP | |
| | SASTGTGPGASPGTSSTGSPGSSPSASTGTGPGTPGSGTASSSPGSSTP | |
| AG360A | TSSTGSPGASPGTSSTGSPGTPGSGTASSSPGASPGTSSTGSPGASPGTSSTGSP | 165 |
| | GASPGTSSTGSPGASPGTSSTGSPGTPGSGTASSSPGSSTPSGATGSPGTPGSGT | |
| | ASSSPGSSTPSGATGSPGTPGSGTASSSPGSSTPSGATGSPGSSTPSGATGSPGS | |
| | SPSASTGTGPGSSPSASTGTGPGASPGTSSTGSPGTPGSGTASSSPGSSTPSGAT | |
| | GSPGSSPSASTGTGPGSSPSASTGTGPGASPGTSSTGSPGASPGTSSTGSPGSST | |
| | PSGATGSPGSSPSASTGTGPGASPGTSSTGSPGSSPSASTGTGPGTPGSGTASSS | |
| | PGSSTPSGATGSPGSSTPSGATGSPGASPG | |
| AG396A | GATGSPGSSTPSGATGSPGSSPSASTGTGPGASPGTSSTGSPGASPGTSSTGSPG | 166 |
| | TPGSGTASSSPGASPGTSSTGSPGASPGTSSTGSPGASPGTSSTGSPGASPGTSS | |
| | TGSPGTPGSGTASSSPGSSTPSGATGSPGTPGSGTASSSPGSSTPSGATGSPGTP | |
| | GSGTASSSPGSSTPSGATGSPGSSTPSGATGSPGSSPSASTGTGPGSSPSASTGT | |
| | GPGASPGTSSTGSPGTPGSGTASSSPGSSTPSGATGSPGSSPSASTGTGPGSSPS | |
| | ASTGTGPGASPGTSSTGSPGASPGTSSTGSPGSSTPSGATGSPGSSPSASTGTGP | |
| | GASPGTSSTGSPGSSPSASTGTGPGTPGSGTASSSPGSSTPSGATGSPGSSTPSG | |
| | ATGSPGASPGT | |
| AG432A | GATGSPGSSTPSGATGSPGASPGTSSTGSPGTPGSGTASSSPGSSTPSGATGSPG | 167 |
| | SSTPSGATGSPGSSTPSGATGSPGSSPSASTGTGPGASPGTSSTGSPGASPGTSS | |
| | TGSPGTPGSGTASSSPGASPGTSSTGSPGASPGTSSTGSPGASPGTSSTGSPGAS | |
| | PGTSSTGSPGTPGSGTASSSPGSSTPSGATGSPGTPGSGTASSSPGSSTPSGATG | |
| | SPGTPGSGTASSSPGSSTPSGATGSPGSSTPSGATGSPGSSPSASTGTGPGSSPS | |
| | ASTGTGPGASPGTSSTGSPGTPGSGTASSSPGSSTPSGATGSPGSSPSASTGTGP | |
| | GSSPSASTGTGPGASPGTSSTGSPGASPGTSSTGSPGSSTPSGATGSPGSSPSAS | |
| | TGTGPGASPGTSSTGSPGSSPSASTGTGPGTPGSGTASSSPGSSTPS | |
| AG468A | TSSTGSPGSSPSASTGTGPGTPGSGTASSSPGASPGTSSTGSPGASPGTSSTGSP | 168 |
| | GASPGTSSTGSPGSSTPSGATGSPGSSTPSGATGSPGASPGTSSTGSPGTPGSGT | |
| | ASSSPGSSTPSGATGSPGSSTPSGATGSPGSSTPSGATGSPGSSPSASTGTGPGA | |
| | SPGTSSTGSPGASPGTSSTGSPGTPGSGTASSSPGASPGTSSTGSPGASPGTSST | |
| | GSPGASPGTSSTGSPGASPGTSSTGSPGTPGSGTASSSPGSSTPSGATGSPGTPG | |
| | SGTASSSPGSSTPSGATGSPGTPGSGTASSSPGSSTPSGATGSPGSSTPSGATGS | |
| | PGSSPSASTGTGPGSSPSASTGTGPGASPGTSSTGSPGTPGSGTASSSPGSSTPS | |
| | GATGSPGSSPSASTGTGPGSSPSASTGTGPGASPGTSSTGSPGASPGTSSTGSPG | |
| | SSTPSGATGSPGSSPSASTGTGPGASPG | |
| AG504A | TSSTGSPGSSPSASTGTGPGTPGSGTASSSPGASPGTSSTGSPGASPGTSSTGSP | 169 |
| | GASPGTSSTGSPGSSTPSGATGSPGSSTPSGATGSPGASPGTSSTGSPGTPGSGT | |
| | ASSSPGSSTPSGATGSPGSSTPSGATGSPGSSTPSGATGSPGSSPSASTGTGPGA | |
| | SPGTSSTGSPGASPGTSSTGSPGTPGSGTASSSPGASPGTSSTGSPGASPGTSST | |
| | GSPGASPGTSSTGSPGASPGTSSTGSPGTPGSGTASSSPGSSTPSGATGSPGTPG | |
| | SGTASSSPGSSTPSGATGSPGTPGSGTASSSPGSSTPSGATGSPGSSTPSGATGS | |
| | PGSSPSASTGTGPGSSPSASTGTGPGASPGTSSTGSPGTPGSGTASSSPGSSTPS | |
| | GATGSPGSSPSASTGTGPGSSPSASTGTGPGASPGTSSTGSPGASPGTSSTGSPG | |
| | SSTPSGATGSPGSSPSASTGTGPGASPGTSSTGSPGSSPSASTGTGPGTPGSGTA | |
| | SSSPGSSTP | |
| AG540A | TSSTGSPGASPGTSSTGSPGSSPSASTGTGPGTPGSGTASSSPGASPGTSSTGSP | 170 |
| | GASPGTSSTGSPGASPGTSSTGSPGSSTPSGATGSPGSSTPSGATGSPGASPGTS | |
| | STGSPGTPGSGTASSSPGSSTPSGATGSPGSSTPSGATGSPGSSTPSGATGSPGS | |
| | SPSASTGTGPGASPGTSSTGSPGASPGTSSTGSPGTPGSGTASSSPGASPGTSST | |
| | GSPGASPGTSSTGSPGASPGTSSTGSPGASPGTSSTGSPGTPGSGTASSSPGSST | |
| | PSGATGSPGTPGSGTASSSPGSSTPSGATGSPGTPGSGTASSSPGSSTPSGATGS | |
| | PGSSTPSGATGSPGSSPSASTGTGPGSSPSASTGTGPGASPGTSSTGSPGTPGSG | |
| | TASSSPGSSTPSGATGSPGSSPSASTGTGPGSSPSASTGTGPGASPGTSSTGSPG | |
| | ASPGTSSTGSPGSSTPSGATGSPGSSPSASTGTGPGASPGTSSTGSPGSSPSAST | |
| | GTGPGTPGSGTASSSPGSSTPSGATGSPGSSTPSGATGSPGASPG | |
| AG576A | TSSTGSPGTPGSGTASSSPGASPGTSSTGSPGASPGTSSTGSPGASPGTSSTGSP | 171 |
| | GSSPSASTGTGPGTPGSGTASSSPGASPGTSSTGSPGASPGTSSTGSPGASPGTS | |
| | STGSPGSSTPSGATGSPGSSTPSGATGSPGASPGTSSTGSPGTPGSGTASSSPGS | |
| | STPSGATGSPGSSTPSGATGSPGSSTPSGATGSPGSSPSASTGTGPGASPGTSST | |
| | GSPGASPGTSSTGSPGTPGSGTASSSPGASPGTSSTGSPGASPGTSSTGSPGASP | |
| | GTSSTGSPGASPGTSSTGSPGTPGSGTASSSPGSSTPSGATGSPGTPGSGTASSS | |
| | PGSSTPSGATGSPGTPGSGTASSSPGSSTPSGATGSPGSSTPSGATGSPGSSPSA | |
| | STGTGPGSSPSASTGTGPGASPGTSSTGSPGTPGSGTASSSPGSSTPSGATGSPG | |
| | SSPSASTGTGPGSSPSASTGTGPGASPGTSSTGSPGASPGTSSTGSPGSSTPSGA | |
| | TGSPGSSPSASTGTGPGASPGTSSTGSPGSSPSASTGTGPGTPGSGTASSSPGSS | |
| | TPSGATGSPGSSTPSGATGSPGASPG | |
| AG612A | STGSPGTPGSGTASSSPGSSTPSGATGSPGASPGTSSTGSPGTPGSGTASSSPGS | 172 |
| | STPSGATGSPGSSPSASTGTGPGSSPSASTGTGPGSSTPSGATGSPGSSTPSGAT | |
| | GSPGASPGTSSTGSPGASPGTSSTGSPGASPGTSSTGSPGTPGSGTASSSPGASP | |
| | GTSSTGSPGASPGTSSTGSPGASPGTSSTGSPGSSPSASTGTGPGTPGSGTASSS | |
| | PGASPGTSSTGSPGASPGTSSTGSPGASPGTSSTGSPGSSTPSGATGSPGSSTPS | |
| | GATGSPGASPGTSSTGSPGTPGSGTASSSPGSSTPSGATGSPGSSTPSGATGSPG | |
| | SSTPSGATGSPGSSPSASTGTGPGASPGTSSTGSPGASPGTSSTGSPGTPGSGTA | |
| | SSSPGASPGTSSTGSPGASPGTSSTGSPGASPGTSSTGSPGASPGTSSTGSPGTP | |
| | GSGTASSSPGSSTPSGATGSPGTPGSGTASSSPGSSTPSGATGSPGTPGSGTASS | |
| | SPGSSTPSGATGSPGSSTPSGATGSPGSSPSASTGTGPGSSPSASTGTGPGASPG | |
| | TSSTGSPGTPGSGTASSSPGSSTPSGATGSPGSSPSASTGTGPGSSPSASTGTGP | |
| | GASPGTS | |
| AG648A | GTASSSPGSSTPSGATGSPGSSPSASTGTGPGSSPSASTGTGPGSSTPSGATGSP | 173 |
| | GSSTPSGATGSPGASPGTSSTGSPGASPGTSSTGSPGASPGTSSTGSPGTPGSGT | |
| | ASSSPGASPGTSSTGSPGASPGTSSTGSPGASPGTSSTGSPGSSPSASTGTGPGT | |
| | PGSGTASSSPGASPGTSSTGSPGASPGTSSTGSPGASPGTSSTGSPGSSTPSGAT | |
| | GSPGSSTPSGATGSPGASPGTSSTGSPGTPGSGTASSSPGSSTPSGATGSPGSST | |
| | PSGATGSPGSSTPSGATGSPGSSPSASTGTGPGASPGTSSTGSPGASPGTSSTGS | |
| | PGTPGSGTASSSPGASPGTSSTGSPGASPGTSSTGSPGASPGTSSTGSPGASPGT | |
| | SSTGSPGTPGSGTASSSPGSSTPSGATGSPGTPGSGTASSSPGSSTPSGATGSPG | |
| | TPGSGTASSSPGSSTPSGATGSPGSSTPSGATGSPGSSPSASTGTGPGSSPSAST | |
| | GTGPGASPGTSSTGSPGTPGSGTASSSPGSSTPSGATGSPGSSPSASTGTGPGSS | |
| | PSASTGTGPGASPGTSSTGSPGASPGTSSTGSPGSSTPSGATGSPGSSPSASTGT | |
| | GPGASPGTSSTGSPGSSPSASTGTGPGTPGSGTASSSPGSSTP | |
| AG684A | TSSTGSPGTPGSGTASSSPGSSTPSGATGSPGSSPSASTGTGPGSSPSASTGTGP | 174 |
| | GSSTPSGATGSPGSSTPSGATGSPGASPGTSSTGSPGASPGTSSTGSPGASPGTS | |
| | STGSPGTPGSGTASSSPGASPGTSSTGSPGASPGTSSTGSPGASPGTSSTGSPGS | |
| | SPSASTGTGPGTPGSGTASSSPGASPGTSSTGSPGASPGTSSTGSPGASPGTSST | |
| | GSPGSSTPSGATGSPGSSTPSGATGSPGASPGTSSTGSPGTPGSGTASSSPGSST | |
| | PSGATGSPGSSTPSGATGSPGSSTPSGATGSPGSSPSASTGTGPGASPGTSSTGS | |
| | PGASPGTSSTGSPGTPGSGTASSSPGASPGTSSTGSPGASPGTSSTGSPGASPGT | |
| | SSTGSPGASPGTSSTGSPGTPGSGTASSSPGSSTPSGATGSPGTPGSGTASSSPG | |
| | SSTPSGATGSPGTPGSGTASSSPGSSTPSGATGSPGSSTPSGATGSPGSSPSAST | |
| | GTGPGSSPSASTGTGPGASPGTSSTGSPGTPGSGTASSSPGSSTPSGATGSPGSS | |
| | PSASTGTGPGSSPSASTGTGPGASPGTSSTGSPGASPGTSSTGSPGSSTPSGATG | |
| | SPGSSPSASTGTGPGASPGTSSTGSPGSSPSASTGTGPGTPGSGTASSSPGSSTP | |
| | SGATGSPGSSTPSGATGSPGASPG | |
| AG720A | TSSTGSPGTPGSGTASSSPGSSTPSGATGSPGASPGTSSTGSPGTPGSGTASSSP | 175 |
| | GSSTPSGATGSPGSSPSASTGTGPGSSPSASTGTGPGSSTPSGATGSPGSSTPSG | |
| | ATGSPGASPGTSSTGSPGASPGTSSTGSPGASPGTSSTGSPGTPGSGTASSSPGA | |
| | SPGTSSTGSPGASPGTSSTGSPGASPGTSSTGSPGSSPSASTGTGPGTPGSGTAS | |
| | SSPGASPGTSSTGSPGASPGTSSTGSPGASPGTSSTGSPGSSTPSGATGSPGSST | |
| | PSGATGSPGASPGTSSTGSPGTPGSGTASSSPGSSTPSGATGSPGSSTPSGATGS | |
| | PGSSTPSGATGSPGSSPSASTGTGPGASPGTSSTGSPGASPGTSSTGSPGTPGSG | |
| | TASSSPGASPGTSSTGSPGASPGTSSTGSPGASPGTSSTGSPGASPGTSSTGSPG | |
| | TPGSGTASSSPGSSTPSGATGSPGTPGSGTASSSPGSSTPSGATGSPGTPGSGTA | |
| | SSSPGSSTPSGATGSPGSSTPSGATGSPGSSPSASTGTGPGSSPSASTGTGPGAS | |
| | PGTSSTGSPGTPGSGTASSSPGSSTPSGATGSPGSSPSASTGTGPGSSPSASTGT | |
| | GPGASPGTSSTGSPGASPGTSSTGSPGSSTPSGATGSPGSSPSASTGTGPGASPG | |
| | TSSTGSPGSSPSASTGTGPGTPGSGTASSSPGSSTPSGATGSPGSSTPSGATGSP | |
| | GASPG | |
| AG756A | TSSTGSPGSSPSASTGTGPGSSPSASTGTGPGTPGSGTASSSPGSSTPSGATGSP | 176 |
| | GSSPSASTGTGPGASPGTSSTGSPGTPGSGTASSSPGSSTPSGATGSPGTPGSGT | |
| | ASSSPGASPGTSSTGSPGASPGTSSTGSPGTPGSGTASSSPGSSTPSGATGSPGA | |
| | SPGTSSTGSPGTPGSGTASSSPGSSTPSGATGSPGSSPSASTGTGPGSSPSASTG | |
| | TGPGSSTPSGATGSPGSSTPSGATGSPGASPGTSSTGSPGASPGTSSTGSPGASP | |
| | GTSSTGSPGTPGSGTASSSPGASPGTSSTGSPGASPGTSSTGSPGASPGTSSTGS | |
| | PGSSPSASTGTGPGTPGSGTASSSPGASPGTSSTGSPGASPGTSSTGSPGASPGT | |
| | SSTGSPGSSTPSGATGSPGSSTPSGATGSPGASPGTSSTGSPGTPGSGTASSSPG | |
| | SSTPSGATGSPGSSTPSGATGSPGSSTPSGATGSPGSSPSASTGTGPGASPGTSS | |
| | TGSPGASPGTSSTGSPGTPGSGTASSSPGASPGTSSTGSPGASPGTSSTGSPGAS | |
| | PGTSSTGSPGASPGTSSTGSPGTPGSGTASSSPGSSTPSGATGSPGTPGSGTASS | |
| | SPGSSTPSGATGSPGTPGSGTASSSPGSSTPSGATGSPGSSTPSGATGSPGSSPS | |
| | ASTGTGPGSSPSASTGTGPGASPGTSSTGSPGTPGSGTASSSPGSSTPSGATGSP | |
| | GSSPSASTGTGPGSSPSASTGTGPGASPGTSSTGSPGASPG | |
| AG792A | TSSTGSPGSSPSASTGTGPGSSPSASTGTGPGTPGSGTASSSPGSSTPSGATGSP | 177 |
| | GSSPSASTGTGPGASPGTSSTGSPGTPGSGTASSSPGSSTPSGATGSPGTPGSGT | |
| | ASSSPGASPGTSSTGSPGASPGTSSTGSPGTPGSGTASSSPGSSTPSGATGSPGA | |
| | SPGTSSTGSPGTPGSGTASSSPGSSTPSGATGSPGSSPSASTGTGPGSSPSASTG | |
| | TGPGSSTPSGATGSPGSSTPSGATGSPGASPGTSSTGSPGASPGTSSTGSPGASP | |
| | GTSSTGSPGTPGSGTASSSPGASPGTSSTGSPGASPGTSSTGSPGASPGTSSTGS | |
| | PGSSPSASTGTGPGTPGSGTASSSPGASPGTSSTGSPGASPGTSSTGSPGASPGT | |
| | SSTGSPGSSTPSGATGSPGSSTPSGATGSPGASPGTSSTGSPGTPGSGTASSSPG | |
| | SSTPSGATGSPGSSTPSGATGSPGSSTPSGATGSPGSSPSASTGTGPGASPGTSS | |
| | TGSPGASPGTSSTGSPGTPGSGTASSSPGASPGTSSTGSPGASPGTSSTGSPGAS | |
| | PGTSSTGSPGASPGTSSTGSPGTPGSGTASSSPGSSTPSGATGSPGTPGSGTASS | |
| | SPGSSTPSGATGSPGTPGSGTASSSPGSSTPSGATGSPGSSTPSGATGSPGSSPS | |
| | ASTGTGPGSSPSASTGTGPGASPGTSSTGSPGTPGSGTASSSPGSSTPSGATGSP | |
| | GSSPSASTGTGPGSSPSASTGTGPGASPGTSSTGSPGASPGTSSTGSPGSSTPSG | |
| | ATGSPGSSPSASTGTGPGASPG | |
| AG828A | TSSTGSPGSSPSASTGTGPGSSPSASTGTGPGTPGSGTASSSPGSSTPSGATGSP | 178 |
| | GSSPSASTGTGPGASPGTSSTGSPGTPGSGTASSSPGSSTPSGATGSPGTPGSGT | |
| | ASSSPGASPGTSSTGSPGASPGTSSTGSPGTPGSGTASSSPGSSTPSGATGSPGA | |
| | SPGTSSTGSPGTPGSGTASSSPGSSTPSGATGSPGSSPSASTGTGPGSSPSASTG | |
| | TGPGSSTPSGATGSPGSSTPSGATGSPGASPGTSSTGSPGASPGTSSTGSPGASP | |
| | GTSSTGSPGTPGSGTASSSPGASPGTSSTGSPGASPGTSSTGSPGASPGTSSTGS | |
| | PGSSPSASTGTGPGTPGSGTASSSPGASPGTSSTGSPGASPGTSSTGSPGASPGT | |
| | SSTGSPGSSTPSGATGSPGSSTPSGATGSPGASPGTSSTGSPGTPGSGTASSSPG | |
| | SSTPSGATGSPGSSTPSGATGSPGSSTPSGATGSPGSSPSASTGTGPGASPGTSS | |
| | TGSPGASPGTSSTGSPGTPGSGTASSSPGASPGTSSTGSPGASPGTSSTGSPGAS | |
| | PGTSSTGSPGASPGTSSTGSPGTPGSGTASSSPGSSTPSGATGSPGTPGSGTASS | |
| | SPGSSTPSGATGSPGTPGSGTASSSPGSSTPSGATGSPGSSTPSGATGSPGSSPS | |
| | ASTGTGPGSSPSASTGTGPGASPGTSSTGSPGTPGSGTASSSPGSSTPSGATGSP | |
| | GSSPSASTGTGPGSSPSASTGTGPGASPGTSSTGSPGASPGTSSTGSPGSSTPSG | |
| | ATGSPGSSPSASTGTGPGASPGTSSTGSPGSSPSASTGTGPGTPGSGTASSSPGS | |
| | STP | |
| AE869 | GSPGSPAGSPTSTEEGTSESATPESGPGTSTEPSEGSAPGSPAGSPTSTEEGTST | 179 |
| | EPSEGSAPGTSTEPSEGSAPGTSESATPESGPGSEPATSGSETPGSEPATSGSET | |
| | PGSPAGSPTSTEEGTSESATPESGPGTSTEPSEGSAPGTSTEPSEGSAPGSPAGS | |
| | PTSTEEGTSTEPSEGSAPGTSTEPSEGSAPGTSESATPESGPGTSTEPSEGSAPG | |
| | TSESATPESGPGSEPATSGSETPGTSTEPSEGSAPGTSTEPSEGSAPGTSESATP | |
| | ESGPGTSESATPESGPGSPAGSPTSTEEGTSESATPESGPGSEPATSGSETPGTS | |
| | ESATPESGPGTSTEPSEGSAPGTSTEPSEGSAPGTSTEPSEGSAPGTSTEPSEGS | |
| | APGTSTEPSEGSAPGTSTEPSEGSAPGSPAGSPTSTEEGTSTEPSEGSAPGTSES | |
| | ATPESGPGSEPATSGSETPGTSESATPESGPGSEPATSGSETPGTSESATPESGP | |
| | GTSTEPSEGSAPGTSESATPESGPGSPAGSPTSTEEGSPAGSPTSTEEGSPAGSP | |
| | TSTEEGTSESATPESGPGTSTEPSEGSAPGTSESATPESGPGSEPATSGSETPGT | |
| | SESATPESGPGSEPATSGSETPGTSESATPESGPGTSTEPSEGSAPGSPAGSPTS | |
| | TEEGTSESATPESGPGSEPATSGSETPGTSESATPESGPGSPAGSPTSTEEGSPA | |
| | GSPTSTEEGTSTEPSEGSAPGTSESATPESGPGTSESATPESGPGTSESATPESG | |
| | PGSEPATSGSETPGSEPATSGSETPGSPAGSPTSTEEGTSTEPSEGSAPGTSTEP | |
| | SEGSAPGSEPATSGSETPGTSESATPESGPGTSTEPSEGSAPGR | |
| AE144_R1 | SAGSPGSPAGSPTSTEEGTSESATPESGPGTSTEPSEGSAPGSPAGSPTSTEEGT | 180 |
| | STEPSEGSAPGTSTEPSEGSAPGTSESATPESGPGSEPATSGSETPGSEPATSGS | |
| | ETPGSPAGSPTSTEEGTSESATPESGPGTESASR | |
| AE288_R1 | SAGSPTGPGSEPATSGSETPGTSESATPESGPGSEPATSGSETPGTSESATPESG | 181 |
| | PGTSTEPSEGSAPGSPAGSPTSTEEGTSESATPESGPGSEPATSGSETPGTSESA | |
| | TPESGPGSPAGSPTSTEEGSPAGSPTSTEEGTSTEPSEGSAPGTSESATPESGPG | |
| | TSESATPESGPGTSESATPESGPGSEPATSGSETPGSEPATSGSETPGSPAGSPT | |
| | STEEGTSTEPSEGSAPGTSTEPSEGSAPGSEPATSGSETPGTSESATPESGPGTS | |
| | TEPSEGSAPSASR | |
| AE432_R1 | SAGSPGSPAGSPTSTEEGTSESATPESGPGTSTEPSEGSAPGSPAGSPTSTEEGT | 182 |
| | STEPSEGSAPGTSTEPSEGSAPGTSESATPESGPGSEPATSGSETPGSEPATSGS | |
| | ETPGSPAGSPTSTEEGTSESATPESGPGTSTEPSEGSAPGTSTEPSEGSAPGSPA | |
| | GSPTSTEEGTSTEPSEGSAPGTSTEPSEGSAPGTSESATPESGPGTSTEPSEGSA | |
| | PGTSESATPESGPGSEPATSGSETPGTSTEPSEGSAPGTSTEPSEGSAPGTSESA | |
| | TPESGPGTSESATPESGPGSPAGSPTSTEEGTSESATPESGPGSEPATSGSETPG | |
| | TSESATPESGPGTSTEPSEGSAPGTSTEPSEGSAPGTSTEPSEGSAPGTSTEPSE | |
| | GSAPGTSTEPSEGSAPGTSTEPSEGSAPGSPAGSPTSTEEGTESASR | |
| AE576_R1 | SAGSPTEEGTSESATPESGPGSEPATSGSETPGTSESATPESGPGTSTEPSEGSA | 183 |
| | PGTSTEPSEGSAPGTSTEPSEGSAPGTSTEPSEGSAPGTSTEPSEGSAPGTSTEP | |
| | SEGSAPGSPAGSPTSTEEGTSTEPSEGSAPGTSESATPESGPGSEPATSGSETPG | |
| | TSESATPESGPGSEPATSGSETPGTSESATPESGPGTSTEPSEGSAPGTSESATP | |
| | ESGPGSPAGSPTSTEEGSPAGSPTSTEEGSPAGSPTSTEEGTSESATPESGPGTS | |
| | TEPSEGSAPGTSESATPESGPGSEPATSGSETPGTSESATPESGPGSEPATSGSE | |
| | TPGTSESATPESGPGTSTEPSEGSAPGSPAGSPTSTEEGTSESATPESGPGSEPA | |
| | TSGSETPGTSESATPESGPGSPAGSPTSTEEGSPAGSPTSTEEGTSTEPSEGSAP | |
| | GTSESATPESGPGTSESATPESGPGTSESATPESGPGSEPATSGSETPGSEPATS | |
| | GSETPGSPAGSPTSTEEGTSTEPSEGSAPGTSTEPSEGSAPGSEPATSGSETPGT | |
| | SESATPESGPGTSTEPSEGSAPSASR | |
| AE864_R1 | SAGSPGSPAGSPTSTEEGTSESATPESGPGTSTEPSEGSAPGSPAGSPTSTEEGT | 184 |
| | STEPSEGSAPGTSTEPSEGSAPGTSESATPESGPGSEPATSGSETPGSEPATSGS | |
| | ETPGSPAGSPTSTEEGTSESATPESGPGTSTEPSEGSAPGTSTEPSEGSAPGSPA | |
| | GSPTSTEEGTSTEPSEGSAPGTSTEPSEGSAPGTSESATPESGPGTSTEPSEGSA | |
| | PGTSESATPESGPGSEPATSGSETPGTSTEPSEGSAPGTSTEPSEGSAPGTSESA | |
| | TPESGPGTSESATPESGPGSPAGSPTSTEEGTSESATPESGPGSEPATSGSETPG | |
| | TSESATPESGPGTSTEPSEGSAPGTSTEPSEGSAPGTSTEPSEGSAPGTSTEPSE | |
| | GSAPGTSTEPSEGSAPGTSTEPSEGSAPGSPAGSPTSTEEGTSTEPSEGSAPGTS | |
| | ESATPESGPGSEPATSGSETPGTSESATPESGPGSEPATSGSETPGTSESATPES | |
| | GPGTSTEPSEGSAPGTSESATPESGPGSPAGSPTSTEEGSPAGSPTSTEEGSPAG | |
| | SPTSTEEGTSESATPESGPGTSTEPSEGSAPGTSESATPESGPGSEPATSGSETP | |
| | GTSESATPESGPGSEPATSGSETPGTSESATPESGPGTSTEPSEGSAPGSPAGSP | |
| | TSTEEGTSESATPESGPGSEPATSGSETPGTSESATPESGPGSPAGSPTSTEEGS | |
| | PAGSPTSTEEGTSTEPSEGSAPGTSESATPESGPGTSESATPESGPGTSESATPE | |
| | SGPGSEPATSGSETPGSEPATSGSETPGSPAGSPTSTEEGTSTEPSEGSAPGTST | |
| | EPSEGSAPGSEPATSGSETPGTSESATPESGPGTESASR | |
| AF864_R1 | SAGSPGSTSSTAESPGPGSTSSTAESPGPGSTSESPSGTAPGSTSSTAESPGPGS | 185 |
| | TSSTAESPGPGTSTPESGSASPGSTSESPSGTAPGTSPSGESSTAPGSTSESPSG | |
| | TAPGSTSESPSGTAPGTSPSGESSTAPGSTSESPSGTAPGSTSESPSGTAPGTSP | |
| | SGESSTAPGSTSESPSGTAPGSTSESPSGTAPGSTSESPSGTAPGTSTPESGSAS | |
| | PGSTSESPSGTAPGTSTPESGSASPGSTSSTAESPGPGSTSSTAESPGPGTSTPE | |
| | SGSASPGTSTPESGSASPGSTSESPSGTAPGTSTPESGSASPGTSTPESGSASPG | |
| | STSESPSGTAPGSTSESPSGTAPGSTSESPSGTAPGSTSSTAESPGPGTSTPESG | |
| | SASPGTSTPESGSASPGSTSESPSGTAPGSTSESPSGTAPGTSTPESGSASPGST | |
| | SESPSGTAPGSTSESPSGTAPGTSTPESGSASPGTSPSGESSTAPGSTSSTAESP | |
| | GPGTSPSGESSTAPGSTSSTAESPGPGTSTPESGSASPGSTSESPSGTAPGSTSS | |
| | TAESPGPGTSTPESGSASPGTSTPESGSASPGSTSSTAESPGPGTSPSGESSTAP | |
| | GTSTPESGSASPGSTSESPSGTAPGSTSESPSGTAPGTSTPESGSASPGTSPSGE | |
| | SSTAPGSTSSTAESPGPGTSPSGESSTAPGSTSSTAESPGPGSTSSTAESPGPGT | |
| | SPSGESSTAPGSTSESPSGTAPGSTSESPSGTAPGTSTPESGSASPGSTSESPSG | |
| | TAPGSTSESPSGTAPGTSTPESGSASPGSTSESPSGTAPGSTSESPSGTAPGSTS | |
| | ESPSGTAPGSTSSTAESPGPGTSPSGESSTAPGTSSASR | |
| AG864_R1 | SAGSPGASPGTSSTGSPGSSPSASTGTGPGSSPSASTGTGPGTPGSGTASSSPGS | 186 |
| | STPSGATGSPGSSPSASTGTGPGASPGTSSTGSPGTPGSGTASSSPGSSTPSGAT | |
| | GSPGTPGSGTASSSPGASPGTSSTGSPGASPGTSSTGSPGTPGSGTASSSPGSST | |
| | PSGATGSPGASPGTSSTGSPGTPGSGTASSSPGSSTPSGATGSPGSSPSASTGTG | |
| | PGSSPSASTGTGPGSSTPSGATGSPGSSTPSGATGSPGASPGTSSTGSPGASPGT | |
| | SSTGSPGASPGTSSTGSPGTPGSGTASSSPGASPGTSSTGSPGASPGTSSTGSPG | |
| | ASPGTSSTGSPGSSPSASTGTGPGTPGSGTASSSPGASPGTSSTGSPGASPGTSS | |
| | TGSPGASPGTSSTGSPGSSTPSGATGSPGSSTPSGATGSPGASPGTSSTGSPGTP | |
| | GSGTASSSPGSSTPSGATGSPGSSTPSGATGSPGSSTPSGATGSPGSSPSASTGT | |
| | GPGASPGTSSTGSPGASPGTSSTGSPGTPGSGTASSSPGASPGTSSTGSPGASPG | |
| | TSSTGSPGASPGTSSTGSPGASPGTSSTGSPGTPGSGTASSSPGSSTPSGATGSP | |
| | GTPGSGTASSSPGSSTPSGATGSPGTPGSGTASSSPGSSTPSGATGSPGSSTPSG | |
| | ATGSPGSSPSASTGTGPGSSPSASTGTGPGASPGTSSTGSPGTPGSGTASSSPGS | |
| | STPSGATGSPGSSPSASTGTGPGSSPSASTGTGPGASPGTSSTGSPGASPGTSST | |
| | GSPGSSTPSGATGSPGSSPSASTGTGPGASPGTSSTGSPGSSPSASTGTGPGTPG | |
| | SGTASSSPGSSTPSGATGSPGSSTPSGATGSPGASSASR | |

[0237] In some embodiments wherein the XTEN has less than 100% of its amino acids consisting of 4, 5, or 6 types of amino acid selected from glycine (G), alanine (A), serine (S), threonine (T), glutamate (E) and proline (P), or less than 100% of the sequence consisting of the sequence motifs from Table 1 or the XTEN sequences of Tables 2, 3 and 22-25 the other amino acid residues of the XTEN are selected from any of the other 14 natural L-amino acids, but are preferentially selected from hydrophilic amino acids such that the XTEN sequence contains at least about 90%, 91%, 92%, 93%, 94%, 95%, 96%, 97%, 98%, or at least about 99% hydrophilic amino acids. An individual amino acid or a short sequence of amino acids other than glycine (G), alanine (A), serine (S), threonine (T), glutamate (E) and proline (P) may be incorporated into the XTEN to achieve a needed property, such as to permit incorporation of a restriction site by the encoding nucleotides, or to facilitate linking to a payload component, or incorporation of a cleavage sequence. As one exemplary embodiment, described more fully below, the invention provides XTEN that incorporates from 1 to about 20, or 1 to about 15, or 1 to about 10, or 1 to 5 lysine residues wherein the reactive lysines are utilized for linking to cross-linkers or payloads, as described herein. In another embodiment, described more fully below, the XTEN incorporates from 1 to about 20, or 1 to about 15, or 1 to about 10, or 1 to 5 cysteine residues wherein the reactive cysteines are utilized for linking to cross-linkers or payloads, as described herein. In another embodiment, the XTEN incorporates from 1 to about 20 cysteine and lysine residues wherein the lysines and cysteines are utilized for linking to different cross-linkers or payloads, as described herein. In another embodiment, the XTEN incorporations 1, 2, 3, 4, 5 or more arginine residues that are not followed by proline residues to provide cleavage sequences that can be cleaved by trypsin to create XTEN segments, described more fully herein, below. The XTEN amino acids that are not glycine (G), alanine (A), serine (S), threonine (T), glutamate (E) and proline (P) are either interspersed throughout the XTEN sequence, are located within or between the sequence motifs, or are concentrated in one or more short stretches of the XTEN sequence such as at or near the N- or C-terminus. As hydrophobic amino acids impart structure to a polypeptide, the invention provides that the content of hydrophobic amino acids in the XTEN utilized in the conjugation constructs will typically be less than 5%, or less than 2%, or less than 1% hydrophobic amino acid content. Hydrophobic residues that are less favored in construction of XTEN include tryptophan, phenylalanine, tyrosine, leucine, isoleucine, valine, and methionine. Additionally, one can design the XTEN sequences to contain less than 5% or less than 4% or less than 3% or less than 2% or less than 1% or none of the following amino acids: methionine (to avoid oxidation), asparagine and glutamine (to avoid desamidation). In other embodiments, the amino acid content of methionine and tryptophan in the XTEN component used in the conjugation constructs is typically less than 5%, or less than 2%, and most preferably less than 1%. In other embodiments, the XTEN of the subject XTEN conjugates will have a sequence that has less than 10% amino acid residues with a positive charge, or less than about 7%, or less that about 5%, or less than about 2% amino acid residues with a positive charge, the sum of methionine and tryptophan residues will be less than 2%, and the sum of asparagine and glutamine residues will be less than 5% of the total XTEN sequence.

### 3. Cysteine- and Lysine-Engineered XTEN Sequences

[0238] In another aspect, the invention provides XTEN with defined numbers of incorporated cysteine or lysine residues; “cysteine-engineered XTEN” and “lysine-engineered XTEN”, respectively. It is an object of the invention to provide XTEN with defined numbers of cysteine and/or lysine residues to permit conjugation between the thiol group of the cysteine or the epsilon amino group of the lysine and a reactive group on a payload or a cross-linker to be conjugated to the XTEN backbone. In one embodiment of the foregoing, the XTEN of the invention has between about 1 to about 100 lysine residues, or about 1 to about 70 lysine residues, or about 1 to about 50 lysine residues, or about 1 to about 30 lysine residues, or about 1 to about 20 lysine residues, or about 1 to about 10 lysine residues, or about 1 to about 5 lysine residues, or 1 to about 3 lysine residues, or alternatively only a single lysine residue. In another embodiment of the foregoing, the XTEN of the invention has between about 1 to about 100 cysteine residues, or about 1 to about 70 cysteine residues, or about 1 to about 50 cysteine residues, or about 1 to about 30 cysteine residues, or about 1 to about 20 cysteine residues, or about 1 to about 10 cysteine residues, or about 1 to about 5 cysteine residues, or 1 to about 3 cysteine residues, or alternatively only a single cysteine residue. In another embodiment of the foregoing, the XTEN of the invention has about 1 to about 10 lysine residues and about 1 to about 10 cysteine residues. Using the foregoing lysine- and/or cysteine-containing XTEN, conjugates can be constructed that comprise XTEN, an optional cross-linker, plus a payload useful in the treatment of a condition in a subject wherein the maximum number of molecules of the payload agent linked to the XTEN component is determined by the numbers of lysines, cysteines or other amino acids with a reactive side group (e.g., a terminal amino or thiol) incorporated into the XTEN.

[0239] In one embodiment, the invention provides cysteine-engineered XTEN where nucleotides encoding one or more amino acids of an XTEN are replaced with a cysteine amino acid to create the cysteine-engineered XTEN gene. In another embodiment, the invention provides cysteine-engineered XTEN where nucleotides encoding one or more cysteine amino acids are inserted into an-XTEN encoding gene to create the cysteine-engineered XTEN gene. In other cases, oligonucleotides encoding one or more motifs of about 9 to about 14 amino acids comprising codons encoding one or more cysteines are linked in frame with other oligos encoding XTEN motifs or full-length XTEN to create the cysteine-engineered XTEN gene. In one embodiment of the foregoing, where the one or more cysteines are inserted into an XTEN sequence during the creation of the XTEN gene, nucleotides encoding cysteine can be linked to codons encoding amino acids used in XTEN to create a cysteine-XTEN motif with the cysteine(s) at a defined position using the methods described herein (see Example 61 and FIGS. 40-41), or by standard molecular biology techniques, and the motifs subsequently assembled into the gene encoding the full-length cysteine-engineered XTEN. In such cases, where, for example, nucleotides encoding a single cysteine are added to the DNA encoding a motif selected from Table 1, the resulting motif would have 13 amino acids, while incorporating two cysteines would result in a motif having 14 amino acids, etc. In other cases, a cysteine-motif can be created de novo and be of a pre-defined length and number of cysteine amino acids by linking nucleotides encoding cysteine to nucleotides encoding one or more amino acid residues used in XTEN (e.g., G, S, T, E, P, A) at a defined position, and the encoding motifs subsequently assembled by annealing with other XTEN-encoding motif sequences into the gene encoding the full-length XTEN, as described herein and illustrated in FIGS. 7-8. In cases where a lysine-engineered XTEN is utilized to make the conjugates of the invention, the approaches described above would be performed with codons encoding lysine instead of cysteine. Thus, by the foregoing, a new XTEN motif can be created that could comprise about 9-14 amino acid residues and have one or more reactive amino acids; i.e., cysteine or lysine. Non-limiting examples of motifs suitable for use in an engineered XTEN that contain a single cysteine or lysine are:

(SEQ ID NO: 187)
GGSPAGSCTSP
(SEQ ID NO: 188)
GASASCAPSTG
(SEQ ID NO: 189)
TAEAAGCGTAEAA
(SEQ ID NO: 190)
GPEPTCPAPSG
(SEQ ID NO: 191)
GGSPAGSKTSP
(SEQ ID NO: 192)
GASASKAPSTG

However, the invention contemplates motifs of different lengths, such as those of Table 5 and Table 11, for incorporation into XTEN.

[0240] In such cases where a gene encoding an XTEN with one or more cysteine and/or lysine motifs is to be constructed from existing XTEN motifs or segments, the gene can be designed and built by linking existing “building block” polynucleotides encoding both short- and long-length XTENs; e.g., AE48, AE144, AE288, AE432, AE576, AE864, AM48, AM875, AE912, AG864, or the nucleotides encoding the 36′mers of Examples 1-4, and Tables 22-25, which can be fused in frame with the nucleotides encoding the cysteine- and/or lysine-containing motifs or, alternatively, the cysteine- and/or lysine-encoding nucleotides can be PCR'ed into an existing XTEN sequence (as described more fully below and in the Examples) using, for example, nucleotides encoding the islands of Tables 4 and 5 to build an engineered XTEN in which the reactive cysteine and/or lysines are placed in one or more designed locations in the sequence in the desired quantity. Non-limiting examples of such engineered XTEN are provided in Table 3. Thus, in one embodiment, the invention provides an XTEN sequence having at least about 80% sequence identity, or at least about 90%, or about 91%, or about 92%, or about 93%, or about 94%, or about 95%, or about 96%, or about 97%, or about 98%, or about 99% sequence identity, or is identical to a sequence or a fragment of a sequence selected from of Table 3, when optimally aligned. However, application of the cysteine- or lysine-engineered methodology to create XTEN encompassing cysteine or lysine residues is not meant to be constrained to the precise compositions or range of composition identities of the foregoing embodiments. As will be appreciated by those skilled in the art, the precise location and numbers of incorporated cysteine or lysine residues in an XTEN can be varied without departing from the invention as described.

TABLE 3
Cysteine- and lysine-engineered XTEN

| | | SEQ |
|---|---|---|
| | | ID |
| Name | Amino Acid Sequence | NO: |
| Seg 1 | AGSPAGSPTSTEEGTSESATPESGPGTSTEPSEGSAPGSPAGSPTSTEEGTSTEPSEG | 193 |
| | SAPGTSTEPSEGSAPGTSESATPESGPGSEPATSGSETPGSEPATSGSETPGSPAGSP | |
| | TSTEEGTSESATPESGPGTSTEPSEGSAPGTSTEPSEGSAPGSPAGSPTSTEEGTSTEP | |
| | SEGSAPGTSTEPSEGSAPGTSESATPESGPGTSTEPSEGSAPGTSESATPESGPGSEP | |
| | ATSGSETPGTSTEPSEGSAPGTSTEPSEGSAPGTSESATPESGPGTSESATPESGPGS | |
| | PAGSPTSTEEGTSESATPESGPGSEPATSGSETPGTSESATPESGPGTSTEPSEGSAP | |
| | GTSTEPSEGSAPGTSTEPSEGSAPGTSTEPSEGSAPGTSTEPSEGSAPGTSTEPSEGS | |
| | APGSPAGSPTSTEEGTSTEPSEGSAPTAEAAGCGTAEAAGTSESATPESGPGSEPAT | |
| | SGSETPGTSESATPESGPGSEPATSGSETPGTSESATPESGPGTSTEPSEGSAPGTSES | |
| | ATPESGPGSPAGSPTSTEEGSPAGSPTSTEEGSPAGSPTSTEEGTSESATPESGPGTS | |
| | TEPSEGSAPGTSESATPESGPGSEPATSGSETPGTSESATPESGPGSEPATSGSETPG | |
| | TSESATPESGPGTSTEPSEGSAPGSPAGSPTSTEEGTSESATPESGPGSEPATSGSETP | |
| | GTSESATPESGPGSPAGSPTSTEEGSPAGSPTSTEEGTSTEPSEGSAPGTSESATPES | |
| | GPGTSESATPESGPGTSESATPESGPGSEPATSGSETPGSEPATSGSETPGSPAGSPT | |
| | STEEGTSTEPSEGSAPGTSTEPSEGSAPGSEPATSGSETPGTSESATPESGPGTSTEPS | |
| | EGSAPR | |
| Seg 2 | ATAEAAGCGTAEAAGSPAGSPTSTEEGTSESATPESGPGTSTEPSEGSAPGSPAGSP | 194 |
| | TSTEEGTSTEPSEGSAPGTSTEPSEGSAPGTSESATPESGPGSEPATSGSETPGSEPA | |
| | TSGSETPGSPAGSPTSTEEGTSESATPESGPGTSTEPSEGSAPGTSTEPSEGSAPGSP | |
| | AGSPTSTEEGTSTEPSEGSAPGTSTEPSEGSAPGTSESATPESGPGTSTEPSEGSAPG | |
| | TSESATPESGPGSEPATSGSETPGTSTEPSEGSAPGTSTEPSEGSAPGTSESATPESGP | |
| | GTSESATPESGPGSPAGSPTSTEEGTSESATPESGPGSEPATSGSETPGTSESATPES | |
| | GPGTSTEPSEGSAPGTSTEPSEGSAPGTSTEPSEGSAPGTSTEPSEGSAPGTSTEPSE | |
| | GSAPGTSTEPSEGSAPGSPAGSPTSTEEGTSTEPSEGSAPGTSESATPESGPGSEPAT | |
| | SGSETPGTSESATPESGPGSEPATSGSETPGTSESATPESGPGTSTEPSEGSAPGTSES | |
| | ATPESGPGSPAGSPTSTEEGSPAGSPTSTEEGSPAGSPTSTEEGTSESATPESGPGTS | |
| | TEPSEGSAPGTSESATPESGPGSEPATSGSETPGTSESATPESGPGSEPATSGSETPG | |
| | TSESATPESGPGTSTEPSEGSAPGSPAGSPTSTEEGTSESATPESGPGSEPATSGSETP | |
| | GTSESATPESGPGSPAGSPTSTEEGSPAGSPTSTEEGTSTEPSEGSAPGTSESATPES | |
| | GPGTSESATPESGPGTSESATPESGPGSEPATSGSETPGSEPATSGSETPGSPAGSPT | |
| | STEEGTSTEPSEGSAPGTSTEPSEGSAPGSEPATSGSETPGTSESATPESGPGTSTEPS | |
| | EGSAPTAEAAGCGTAEAAR | |
| Seg 3 | ATAEAAGCGTAEAAGSPAGSPTSTEEGTSESATPESGPGTSTEPSEGSAPGSPAGSP | 195 |
| | TSTEEGTSTEPSEGSAPGTSTEPSEGSAPGTSESATPESGPGSEPATSGSETPGSEPA | |
| | TSGSETPGSPAGSPTSTEEGTSESATPESGPGTSTEPSEGSAPGTSTEPSEGSAPGSP | |
| | AGSPTSTEEGTSTEPSEGSAPGTSTEPSEGSAPGTSESATPESGPGTSTEPSEGSAPG | |
| | TSESATPESGPGSEPATSGSETPGTSTEPSEGSAPGTSTEPSEGSAPGTSESATPESGP | |
| | GTSESATPESGPGSPAGSPTSTEEGTSESATPESGPGSEPATSGSETPGTSESATPES | |
| | GPGTSTEPSEGSAPGTSTEPSEGSAPGTSTEPSEGSAPGTSTEPSEGSAPGTSTEPSE | |
| | GSAPGTSTEPSEGSAPGSPAGSPTSTEEGTSTEPSEGSAPTAEAAGCGTAEAAGTSE | |
| | SATPESGPGSEPATSGSETPGTSESATPESGPGSEPATSGSETPGTSESATPESGPGT | |
| | STEPSEGSAPGTSESATPESGPGSPAGSPTSTEEGSPAGSPTSTEEGSPAGSPTSTEE | |
| | GTSESATPESGPGTSTEPSEGSAPGTSESATPESGPGSEPATSGSETPGTSESATPES | |
| | GPGSEPATSGSETPGTSESATPESGPGTSTEPSEGSAPGSPAGSPTSTEEGTSESATP | |
| | ESGPGSEPATSGSETPGTSESATPESGPGSPAGSPTSTEEGSPAGSPTSTEEGTSTEPS | |
| | EGSAPGTSESATPESGPGTSESATPESGPGTSESATPESGPGSEPATSGSETPGSEPA | |
| | TSGSETPGSPAGSPTSTEEGTSTEPSEGSAPGTSTEPSEGSAPGSEPATSGSETPGTS | |
| | ESATPESGPGTSTEPSEGSAPTAEAAGCGTAEAAR | |
| Seg 4 | ATAEAAGCGTAEAAGSPAGSPTSTEEGTSESATPESGPGTSTEPSEGSAPGSPAGSP | 196 |
| | TSTEEGTSTEPSEGSAPGTSTEPSEGSAPGTSESATPESGPGSEPATSGSETPGSEPA | |
| | TSGSETPGSPAGSPTSTEEGTSESATPESGPGTSTEPSEGSAPGTSTEPSEGSAPGSP | |
| | AGSPTSTEEGTSTEPSEGSAPGTSTEPSEGSAPGTSESATPESGPGTSTEPSEGSAPG | |
| | TSESATPESGPGSEPATSGSETPGTSTEPSEGSAPGTSTEPSEGSAPGTSESATPESGP | |
| | GTSESATPESGPTAEAAGCGTAEAAGSPAGSPTSTEEGTSESATPESGPGSEPATSG | |
| | SETPGTSESATPESGPGTSTEPSEGSAPGTSTEPSEGSAPGTSTEPSEGSAPGTSTEPS | |
| | EGSAPGTSTEPSEGSAPGTSTEPSEGSAPGSPAGSPTSTEEGTSTEPSEGSAPGTSES | |
| | ATPESGPGSEPATSGSETPGTSESATPESGPGSEPATSGSETPGTSESATPESGPGTS | |
| | TEPSEGSAPGTSESATPESGPGSPAGSPTSTEEGSPAGSPTSTEEGSPAGSPTSTEEG | |
| | TSESATPESGPGTSTEPSEGSAPTAEAAGCGTAEAAGTSESATPESGPGSEPATSGS | |
| | ETPGTSESATPESGPGSEPATSGSETPGTSESATPESGPGTSTEPSEGSAPGSPAGSP | |
| | TSTEEGTSESATPESGPGSEPATSGSETPGTSESATPESGPGSPAGSPTSTEEGSPAG | |
| | SPTSTEEGTSTEPSEGSAPGTSESATPESGPGTSESATPESGPGTSESATPESGPGSEP | |
| | ATSGSETPGSEPATSGSETPGSPAGSPTSTEEGTSTEPSEGSAPGTSTEPSEGSAPGS | |
| | EPATSGSETPGTSESATPESGPGTSTEPSEGSAPTAEAAGCGTAEAAR | |
| Seg 5 | ATAEAAGCGTAEAAGSPAGSPTSTEEGTSESATPESGPGTSTEPSEGSAPGSPAGSP | 197 |
| | TSTEEGTSTEPSEGSAPGTSTEPSEGSAPGTSESATPESGPGSEPATSGSETPGSEPA | |
| | TSGSETPGSPAGSPTSTEEGTSESATPESGPGTSTEPSEGSAPGTSTEPSEGSAPGSP | |
| | AGSPTSTEEGTSTEPSEGSAPGTSTEPSEGSAPGTSESATPESGPGTSTEPSEGSAPT | |
| | AEAAGCGTAEAAGTSESATPESGPGSEPATSGSETPGTSTEPSEGSAPGTSTEPSEG | |
| | SAPGTSESATPESGPGTSESATPESGPGSPAGSPTSTEEGTSESATPESGPGSEPATS | |
| | GSETPGTSESATPESGPGTSTEPSEGSAPGTSTEPSEGSAPGTSTEPSEGSAPGTSTE | |
| | PSEGSAPGTSTEPSEGSAPGTSTEPSEGSAPGSPAGSPTSTEEGTSTEPSEGSAPTAE | |
| | AAGCGTAEAAGTSESATPESGPGSEPATSGSETPGTSESATPESGPGSEPATSGSET | |
| | PGTSESATPESGPGTSTEPSEGSAPGTSESATPESGPGSPAGSPTSTEEGSPAGSPTS | |
| | TEEGSPAGSPTSTEEGTSESATPESGPGTSTEPSEGSAPGTSESATPESGPGSEPATS | |
| | GSETPGTSESATPESGPGSEPATSGSETPGTSESATPESGPGTSTEPSEGSAPTAEAA | |
| | GCGTAEAAGSPAGSPTSTEEGTSESATPESGPGSEPATSGSETPGTSESATPESGPG | |
| | SPAGSPTSTEEGSPAGSPTSTEEGTSTEPSEGSAPGTSESATPESGPGTSESATPESGP | |
| | GTSESATPESGPGSEPATSGSETPGSEPATSGSETPGSPAGSPTSTEEGTSTEPSEGS | |
| | APGTSTEPSEGSAPGSEPATSGSETPGTSESATPESGPGTSTEPSEGSAPTAEAAGC | |
| | GTAEAAR | |
| Seg 6 | ATAEAAGCGTAEAAGSPAGSPTSTEEGTSESATPESGPGTSTEPSEGSAPGSPAGSP | 198 |
| | TSTEEGTSTEPSEGSAPGTSTEPSEGSAPGTSESATPESGPGSEPATSGSETPGSEPA | |
| | TSGSETPGSPAGSPTSTEEGTSESATPESGPGTSTEPSEGSAPGTSTEPSEGSAPGSP | |
| | AGSPTSTEEGTSTETAEAAGCGTAEAAPSEGSAPGTSTEPSEGSAPGTSESATPESG | |
| | PGTSTEPSEGSAPGTSESATPESGPGSEPATSGSETPGTSTEPSEGSAPGTSTEPSEGS | |
| | APGTSESATPESGPGTSESATPESGPGSPAGSPTSTEEGTSESATPESGPGSEPATSG | |
| | SETPGTSESATPESGPGTSTEPSEGSTAEAAGCGTAEAAAPGTSTEPSEGSAPGTST | |
| | EPSEGSAPGTSTEPSEGSAPGTSTEPSEGSAPGTSTEPSEGSAPGSPAGSPTSTEEGT | |
| | STEPSEGSAPGTSESATPESGPGSEPATSGSETPGTSESATPESGPGSEPATSGSETP | |
| | GTSESATPESGPGTSTEPSEGSAPGTSESATPESGPGSTAEAAGCGTAEAAPAGSPT | |
| | STEEGSPAGSPTSTEEGSPAGSPTSTEEGTSESATPESGPGTSTEPSEGSAPGTSESA | |
| | TPESGPGSEPATSGSETPGTSESATPESGPGSEPATSGSETPGTSESATPESGPGTST | |
| | EPSEGSAPGSPAGSPTSTEEGTSESATPESGPGSEPATSGSETPGTSESATTAEAAGC | |
| | GTAEAAPESGPGSPAGSPTSTEEGSPAGSPTSTEEGTSTEPSEGSAPGTSESATPESG | |
| | PGTSESATPESGPGTSESATPESGPGSEPATSGSETPGSEPATSGSETPGSPAGSPTS | |
| | TEEGTSTEPSEGSAPGTSTEPSEGSAPGSEPATSGSETPGTSESATPESGPGTSTEPSE | |
| | GSAPTAEAAGCGTAEAAR | |
| Seg 7 | ATAEAAGCGTAEAAGSPAGSPTSTEEGTSESATPESGPGTSTEPSEGSAPGSPAGSP | 199 |
| | TSTEEGTSTEPSEGSAPGTSTEPSEGSAPGTSESATPESGPGSEPATSGSETPGSEPA | |
| | TSGSETPGSPAGSPTSTEEGTSESATPESGPGTSTEPSEGSAPTAEAAGCGTAEAAG | |
| | TSTEPSEGSAPGSPAGSPTSTEEGTSTEPSEGSAPGTSTEPSEGSAPGTSESATPESGP | |
| | GTSTEPSEGSAPGTSESATPESGPGSEPATSGSETPGTSTEPSEGSAPGTSTEPSEGS | |
| | APGTSESATPESGPGTSESATPESGPTAEAAGCGTAEAAGSPAGSPTSTEEGTSESA | |
| | TPESGPGSEPATSGSETPGTSESATPESGPGTSTEPSEGSAPGTSTEPSEGSAPGTST | |
| | EPSEGSAPGTSTEPSEGSAPGTSTEPSEGSAPGTSTEPSEGSAPGSPAGSPTSTEEGT | |
| | STEPSEGSAPTAEAAGCGTAEAAGTSESATPESGPGSEPATSGSETPGTSESATPES | |
| | GPGSEPATSGSETPGTSESATPESGPGTSTEPSEGSAPGTSESATPESGPGSPAGSPT | |
| | STEEGSPAGSPTSTEEGSPAGSPTSTEEGTSESATPESGPGTSTEPSEGSAPTAEAAG | |
| | CGTAEAAGTSESATPESGPGSEPATSGSETPGTSESATPESGPGSEPATSGSETPGTS | |
| | ESATPESGPGTSTEPSEGSAPGSPAGSPTSTEEGTSESATPESGPGSEPATSGSETPG | |
| | TSESATPESGPGSPAGSPTSTEEGSPAGSPTSTEETAEAAGCGTAEAAGTSTEPSEG | |
| | SAPGTSESATPESGPGTSESATPESGPGTSESATPESGPGSEPATSGSETPGSEPATS | |
| | GSETPGSPAGSPTSTEEGTSTEPSEGSAPGTSTEPSEGSAPGSEPATSGSETPGTSES | |
| | ATPESGPGTSTEPSEGSAPTAEAAGCGTAEAAR | |
| Seg 8 | ATAEAAGCGTAEAAGSPAGSPTSTEEGTSESATPESGPGTSTEPSEGSAPGSPAGSP | 200 |
| | TSTEEGTSTEPSEGSAPGTSTEPSEGSAPGTSESATPESGPGSEPATSGSETPGSEPA | |
| | TSGSETPGSPAGSPTSTEEGTSTAEAAGCGTAEAAESATPESGPGTSTEPSEGSAPG | |
| | TSTEPSEGSAPGSPAGSPTSTEEGTSTEPSEGSAPGTSTEPSEGSAPGTSESATPESGP | |
| | GTSTEPSEGSAPGTSESATPESGPGSEPATSGSETPGTSTEPSTAEAAGCGTAEAAE | |
| | GSAPGTSTEPSEGSAPGTSESATPESGPGTSESATPESGPGSPAGSPTSTEEGTSESA | |
| | TPESGPGSEPATSGSETPGTSESATPESGPGTSTEPSEGSAPGTSTEPSEGSAPGTST | |
| | EPSEGSTAEAAGCGTAEAAAPGTSTEPSEGSAPGTSTEPSEGSAPGTSTEPSEGSAP | |
| | GSPAGSPTSTEEGTSTEPSEGSAPGTSESATPESGPGSEPATSGSETPGTSESATPES | |
| | GPGSEPATSGSETPGTSESATPESGPGTTAEAAGCGTAEAASTEPSEGSAPGTSESA | |
| | TPESGPGSPAGSPTSTEEGSPAGSPTSTEEGSPAGSPTSTEEGTSESATPESGPGTST | |
| | EPSEGSAPGTSESATPESGPGSEPATSGSETPGTSESATPESGPGSEPATAEAAGCG | |
| | TAEAATSGSETPGTSESATPESGPGTSTEPSEGSAPGSPAGSPTSTEEGTSESATPES | |
| | GPGSEPATSGSETPGTSESATPESGPGSPAGSPTSTEEGSPAGSPTSTEEGTSTEPSE | |
| | GSAPGTSESATPETAEAAGCGTAEAASGPGTSESATPESGPGTSESATPESGPGSEP | |
| | ATSGSETPGSEPATSGSETPGSPAGSPTSTEEGTSTEPSEGSAPGTSTEPSEGSAPGS | |
| | EPATSGSETPGTSESATPESGPGTSTEPSEGSAPTAEAAGCGTAEAAR | |
| Seg 9 | ATAEAAGCGTAEAAGSPAGSPTSTEEGTSESATPESGPGTSTEPSEGSAPGSPAGSP | 201 |
| | TSTEEGTSTEPSEGSAPGTSTEPSEGSAPGTSESATPESGPGSEPATSGSETPGSEPA | |
| | TSGSETPGSPAGSPTSTEEGTSESATPESGPGTSTEPSEGSAPGTSTEPSEGSAPGSP | |
| | AGSPTSTEEGTSTEPSEGSAPGTSTEPSEGSAPGTSESATPESGPGTSTEPSEGSAPG | |
| | TSESATPESGPGSEPATSGSETPGTSTEPSEGSAPGTSTEPSEGSAPGTSESATPESGP | |
| | GTSESATPESGPGSPAGSPTSTEEGTSESATPESGPGSEPATSGSETPGTSESATPES | |
| | GPGTSTEPSEGSAPGTSTEPSEGSAPGTSTEPSEGSAPGTSTEPSEGSAPGTSTEPSE | |
| | GSAPGTSTEPSEGSAPGSPAGSPTSTEEGTSTEPSEGSAPGTSESATPESGPGSEPAT | |
| | SGSETPGTSESATPESGPGSEPATSGSETPGTSESATPESGPGTSTEPSEGSAPGTSES | |
| | ATPESGPGSPAGSPTSTEEGSPAGSPTSTEEGSPAGSPTSTEEGTSESATPESGPGTS | |
| | TEPSEGSAPGTSESATPESGPGSEPATSGSETPGTSESATPESGPGSEPATSGSETPG | |
| | TSESATPESGPGTSTEPSEGSAPGSPAGSPTSTEEGTSESATPESGPGSEPATSGSETP | |
| | GTSESATPESGPGSPAGSPTSTEEGSPAGSPTSTEEGTSTEPSEGSAPGTSESATPES | |
| | GPGTSESATPESGPGTSESATPESGPGSEPATSGSETPGSEPATSGSETPGSPAGSPT | |
| | STEEGTSTEPSEGSAPGTSTEPSEGSAPGSEPATSGSETPGTSESATPESGPGTSTEPS | |
| | EGSAPR | |
| Seg 10 | AGSPAGSPTSTEEGTSESATPESGPGTSTEPSEGSAPGSPAGSPTSTEEGTSTEPSEG | 202 |
| | SAPGTSTEPSEGSAPGTSESATPESGPGSEPATSGSETPGSEPATSGSETPGSPAGSP | |
| | TSTEEGTSESATPESGPGTSTEPSEGSAPGTSTEPSEGSAPGSPAGSPTSTEEGTSTEP | |
| | SEGSAPGTSTEPSEGSAPGTSESATPESGPGTSTEPSEGSAPGTSESATPESGPGSEP | |
| | ATSGSETPGTSTEPSEGSAPGTSTEPSEGSAPGTSESATPESGPGTSESATPESGPGS | |
| | PAGSPTSTEEGTSESATPESGPGSEPATSGSETPGTSESATPESGPGTSTEPSEGSAP | |
| | GTSTEPSEGSAPGTSTEPSEGSAPGTSTEPSEGSAPGTSTEPSEGSAPGTSTEPSEGS | |
| | APGSPAGSPTSTEEGTSTEPSEGSAPGTSESATPESGPGSEPATSGSETPGTSESATP | |
| | ESGPGSEPATSGSETPGTSESATPESGPGTSTEPSEGSAPGTSESATPESGPGSPAGS | |
| | PTSTEEGSPAGSPTSTEEGSPAGSPTSTEEGTSESATPESGPGTSTEPSEGSAPGTSES | |
| | ATPESGPGSEPATSGSETPGTSESATPESGPGSEPATSGSETPGTSESATPESGPGTS | |
| | TEPSEGSAPGSPAGSPTSTEEGTSESATPESGPGSEPATSGSETPGTSESATPESGPG | |
| | SPAGSPTSTEEGSPAGSPTSTEEGTSTEPSEGSAPGTSESATPESGPGTSESATPESGP | |
| | GTSESATPESGPGSEPATSGSETPGSEPATSGSETPGSPAGSPTSTEEGTSTEPSEGS | |
| | APGTSTEPSEGSAPGSEPATSGSETPGTSESATPESGPGTSTEPSEGSAPTAEAAGC | |
| | GTAEAAR | |
| Seg 11 | ATAEAAGCGTAEAAGSPAGSPTSTEEGTSESATPESGPGTSTEPSEGSAPGSPAGSP | 203 |
| | TSTEEGTSTEPSEGSAPGTSTEPSEGSAPGTSESATPESGPGSEPATSGSETPGSEPA | |
| | TSGSETPGSPAGSPTSTEEGTSESATPESGPGTSTEPSEGSAPGTSTEPSEGSAPGSP | |
| | AGSPTSTEEGTSTEPSEGSAPGTSTEPSEGSAPGTSESATPESGPGTSTEPSEGSAPG | |
| | TSESATPESGPGSEPATSGSETPGTSTEPSEGSAPGTSTEPSEGSAPGTSESATPESGP | |
| | GTSESATPESGPGSPAGSPTSTEEGTSESATPESGPGSEPATSGSETPGTSESATPES | |
| | GPGTSTEPSEGSAPGTSTEPSEGSAPGTSTEPSEGSAPGTSTEPSEGSAPGTSTEPSE | |
| | GSAPGTSTEPSEGSAPGSPAGSPTSTEEGTSTEPSEGSAPTAEAAGCGTAEAAGTSE | |
| | SATPESGPGSEPATSGSETPGTSESATPESGPGSEPATSGSETPGTSESATPESGPGT | |
| | STEPSEGSAPGTSESATPESGPGSPAGSPTSTEEGSPAGSPTSTEEGSPAGSPTSTEE | |
| | GTSESATPESGPGTSTEPSEGSAPGTSESATPESGPGSEPATSGSETPGTSESATPES | |
| | GPGSEPATSGSETPGTSESATPESGPGTSTEPSEGSAPGSPAGSPTSTEEGTSESATP | |
| | ESGPGSEPATSGSETPGTSESATPESGPGSPAGSPTSTEEGSPAGSPTSTEEGTSTEPS | |
| | EGSAPGTSESATPESGPGTSESATPESGPGTSESATPESGPGSEPATSGSETPGSEPA | |
| | TSGSETPGSPAGSPTSTEEGTSTEPSEGSAPGTSTEPSEGSAPGSEPATSGSETPGTS | |
| | ESATPESGPGTSTEPSEGSAPR | |
| Seg 12 | AGSPAGSPTSTEEGTSESATPESGPGTSTEPSEGSAPGSPAGSPTSTEEGTSTEPSEG | 204 |
| | SAPGTSTEPSEGSAPGTSESATPESGPGSEPATSGSETPGSEPATSGSETPGSPAGSP | |
| | TSTEEGTSESATPESGPGTSTEPSEGSAPGTSTEPSEGSAPGSPAGSPTSTEEGTSTEP | |
| | SEGSAPGTSTEPSEGSAPGTSESATPESGPGTSTEPSEGSAPGTSESATPESGPGSEP | |
| | ATSGSETPGTSTEPSEGSAPGTSTEPSEGSAPGTSESATPESGPGTSESATPESGPGS | |
| | PAGSPTSTEEGTSESATPESGPGSEPATSGSETPGTSESATPESGPGTSTEPSEGSAP | |
| | GTSTEPSEGSAPGTSTEPSEGSAPGTSTEPSEGSAPGTSTEPSEGSAPGTSTTAEAAG | |
| | CGTAEAAEPSEGSAPGSPAGSPTSTEEGTSTEPSEGSAPGTSESATPESGPGSEPATT | |
| | AEAAGCGTAEAASGSETPGTSESATPESGPGSEPATSGSETPGTSESATPESGPGTS | |
| | TEPSEGSAPGTSESATPESGPGSPAGSPTSTEEGSPAGSPTSTEEGSPAGSPTSTEEG | |
| | TSESATPESGPGTSTEPSEGSAPGTSESATPESGPGSEPATSGSETPGTSESATPESGP | |
| | GSEPATSGSETPGTSESATPESGPGTSTEPSEGSAPGSPAGSPTSTEEGTSESATPES | |
| | GPGSEPATSGSETPGTSESATPESGPGSPAGSPTSTEEGSPAGSPTSTEEGTSTEPSE | |
| | GSAPGTSESATPESGPGTSESATPESGPGTSESATPESGPGSEPATSGSETPGSEPAT | |
| | SGSETPGSPAGSPTSTEEGTSTEPSEGSAPGTSTEPSEGSAPGSEPATSGSETPGTSES | |
| | ATPESGPGTSTEPSEGSAPR | |
| Seg 13 | AGSPAGSPTSTEEGTSESATPESGPGTSTEPSEGSAPGSPAGSPTSTEEGTSTEPSEG | 205 |
| | SAPGTSTEPSEGSAPGTSESATPESGPGSEPATSGSETPGSEPATSGSETPGSPAGSP | |
| | TSTEEGTSESATPESGPGTSTEPSEGSAPGTSTEPSEGSAPGSPAGSPTSTEEGTSTEP | |
| | SEGSAPGTSTEPSEGSAPGTSESATPESGPGTSTEPSEGSAPGTSESATPESGPGSEP | |
| | ATSGSETPGTSTEPSEGSAPGTSTEPSEGSAPGTSESATPESGPGTSESATPESGPGS | |
| | PAGSPTSTEEGTSESATPESGPGSEPATSGSETPGTSESATPESGPGTSTEPSEGSAP | |
| | GTSTEPSEGSAPGTSTEPSEGSAPGTSTEPSEGSAPGTSTEPSEGSAPGTSTEPSEGS | |
| | APGSPAGSPTSTEEGTSTEPSEGSAPTAEAAGCGTAEAAGTSESATPESGPGSEPAT | |
| | SGSETPGTSESATPESGPGSEPATSGSETPGTSESATPESGPGTSTEPSEGSAPGTSES | |
| | ATPESGPGSPAGSPTSTEEGSPAGSPTSTEEGSPAGSPTSTEEGTSESATPESGPGTS | |
| | TEPSEGSAPGTSESATPESGPGSEPATSGSETPGTSESATPESGPGSEPATSGSETPG | |
| | TSESATPESGPGTSTEPSEGSAPGSPAGSPTSTEEGTSESATPESGPGSEPATSGSETP | |
| | GTSESATPESGPGSPAGSPTSTEEGSPAGSPTSTEEGTSTEPSEGSAPGTSESATPES | |
| | GPGTSESATPESGPGTSESATPESGPGSEPATSGSETPGSEPATSGSETPGSPAGSPT | |
| | STEEGTSTEPSEGSAPGTSTEPSEGSAPGSEPATSGSETPGTSESATPESGPGTSTEPS | |
| | EGSAPTAEAAGCGTAEAAR | |
| Seg 14 | AGSPAGSPTSTEEGTSESATPESGPGTSTEPSEGSAPGSPAGSPTSTEEGTSTEPSEG | 206 |
| | SAPGTSTEPSEGSAPGTSESATPESGPGSEPATSGSETPGSEPATSGSETPGSPAGSP | |
| | TSTEEGTSESATPESGPGTSTEPSEGSAPGTSTEPSEGSAPGSPAGSPTSTEEGTSTEP | |
| | SEGSAPGTSTEPSEGSAPGTSESATPESGPGTSTEPSEGSAPGTSESATPESGPGSEP | |
| | ATSGSETPGTSTEPSEGSAPGTSTEPSEGSAPGTSESATPESGPGTSESATPESGPGS | |
| | PAGSPTSTEEGTSESATPESGPGSEPATSGSETPGTSESATPESGPGTSTEPSEGSAP | |
| | GTSTEPSEGSAPGTSTEPSEGSAPGTSTEPSEGSAPGTSTEPSEGSAPGTSTEPSEGS | |
| | APGSPAGSPTSTEEGTSTEPSEGSAPGGKPGGTSESATPESGPGSEPATSGSETPGTS | |
| | ESATPESGPGSEPATSGSETPGTSESATPESGPGTSTEPSEGSAPGTSESATPESGPG | |
| | SPAGSPTSTEEGSPAGSPTSTEEGSPAGSPTSTEEGTSESATPESGPGTSTEPSEGSAP | |
| | GTSESATPESGPGSEPATSGSETPGTSESATPESGPGSEPATSGSETPGTSESATPES | |
| | GPGTSTEPSEGSAPGSPAGSPTSTEEGTSESATPESGPGSEPATSGSETPGTSESATP | |
| | ESGPGSPAGSPTSTEEGSPAGSPTSTEEGTSTEPSEGSAPGTSESATPESGPGTSESA | |
| | TPESGPGTSESATPESGPGSEPATSGSETPGSEPATSGSETPGSPAGSPTSTEEGTST | |
| | EPSEGSAPGTSTEPSEGSAPGSEPATSGSETPGTSESATPESGPGTSTEPSEGSAPR | |
| Seg 15 | AGGKPGGSPAGSPTSTEEGTSESATPESGPGTSTEPSEGSAPGSPAGSPTSTEEGTST | 207 |
| | EPSEGSAPGTSTEPSEGSAPGTSESATPESGPGSEPATSGSETPGSEPATSGSETPGS | |
| | PAGSPTSTEEGTSESATPESGPGTSTEPSEGSAPGTSTEPSEGSAPGSPAGSPTSTEE | |
| | GTSTEPSEGSAPGTSTEPSEGSAPGTSESATPESGPGTSTEPSEGSAPGTSESATPES | |
| | GPGSEPATSGSETPGTSTEPSEGSAPGTSTEPSEGSAPGTSESATPESGPGTSESATP | |
| | ESGPGSPAGSPTSTEEGTSESATPESGPGSEPATSGSETPGTSESATPESGPGTSTEPS | |
| | EGSAPGTSTEPSEGSAPGTSTEPSEGSAPGTSTEPSEGSAPGTSTEPSEGSAPGTSTE | |
| | PSEGSAPGSPAGSPTSTEEGTSTEPSEGSAPGTSESATPESGPGSEPATSGSETPGTS | |
| | ESATPESGPGSEPATSGSETPGTSESATPESGPGTSTEPSEGSAPGTSESATPESGPG | |
| | SPAGSPTSTEEGSPAGSPTSTEEGSPAGSPTSTEEGTSESATPESGPGTSTEPSEGSAP | |
| | GTSESATPESGPGSEPATSGSETPGTSESATPESGPGSEPATSGSETPGTSESATPES | |
| | GPGTSTEPSEGSAPGSPAGSPTSTEEGTSESATPESGPGSEPATSGSETPGTSESATP | |
| | ESGPGSPAGSPTSTEEGSPAGSPTSTEEGTSTEPSEGSAPGTSESATPESGPGTSESA | |
| | TPESGPGTSESATPESGPGSEPATSGSETPGSEPATSGSETPGSPAGSPTSTEEGTST | |
| | EPSEGSAPGTSTEPSEGSAPGSEPATSGSETPGTSESATPESGPGTSTEPSEGSAPGG | |
| | KPGR | |
| Seg 16 | AGGKPGGSPAGSPTSTEEGTSESATPESGPGTSTEPSEGSAPGSPAGSPTSTEEGTST | 208 |
| | EPSEGSAPGTSTEPSEGSAPGTSESATPESGPGSEPATSGSETPGSEPATSGSETPGS | |
| | PAGSPTSTEEGTSESATPESGPGTSTEPSEGSAPGTSTEPSEGSAPGSPAGSPTSTEE | |
| | GTSTEPSEGSAPGTSTEPSEGSAPGTSESATPESGPGTSTEPSEGSAPGTSESATPES | |
| | GPGSEPATSGSETPGTSTEPSEGSAPGTSTEPSEGSAPGTSESATPESGPGTSESATP | |
| | ESGPGSPAGSPTSTEEGTSESATPESGPGSEPATSGSETPGTSESATPESGPGTSTEPS | |
| | EGSAPGTSTEPSEGSAPGTSTEPSEGSAPGTSTEPSEGSAPGTSTEPSEGSAPGTSTE | |
| | PSEGSAPGSPAGSPTSTEEGTSTEPSEGSAPGGKPGGTSESATPESGPGSEPATSGSE | |
| | TPGTSESATPESGPGSEPATSGSETPGTSESATPESGPGTSTEPSEGSAPGTSESATP | |
| | ESGPGSPAGSPTSTEEGSPAGSPTSTEEGSPAGSPTSTEEGTSESATPESGPGTSTEPS | |
| | EGSAPGTSESATPESGPGSEPATSGSETPGTSESATPESGPGSEPATSGSETPGTSES | |
| | ATPESGPGTSTEPSEGSAPGSPAGSPTSTEEGTSESATPESGPGSEPATSGSETPGTS | |
| | ESATPESGPGSPAGSPTSTEEGSPAGSPTSTEEGTSTEPSEGSAPGTSESATPESGPG | |
| | TSESATPESGPGTSESATPESGPGSEPATSGSETPGSEPATSGSETPGSPAGSPTSTEE | |
| | GTSTEPSEGSAPGTSTEPSEGSAPGSEPATSGSETPGTSESATPESGPGTSTEPSEGS | |
| | APGGKPGR | |
| Seg 17 | AGGKPGGSPAGSPTSTEEGTSESATPESGPGTSTEPSEGSAPGSPAGSPTSTEEGTST | 209 |
| | EPSEGSAPGTSTEPSEGSAPGTSESATPESGPGSEPATSGSETPGSEPATSGSETPGS | |
| | PAGSPTSTEEGTSESATPESGPGTSTEPSEGSAPGTSTEPSEGSAPGSPAGSPTSTEE | |
| | GTSTEPSEGSAPGTSTEPSEGSAPGTSESATPESGPGTSTEPSEGSAPGTSESATPES | |
| | GPGSEPATSGSETPGTSTEPSEGSAPGTSTEPSEGSAPGTSESATPESGPGTSESATP | |
| | ESGPGGKPGGSPAGSPTSTEEGTSESATPESGPGSEPATSGSETPGTSESATPESGPG | |
| | TSTEPSEGSAPGTSTEPSEGSAPGTSTEPSEGSAPGTSTEPSEGSAPGTSTEPSEGSAP | |
| | GTSTEPSEGSAPGSPAGSPTSTEEGTSTEPSEGSAPGTSESATPESGPGSEPATSGSE | |
| | TPGTSESATPESGPGSEPATSGSETPGTSESATPESGPGTSTEPSEGSAPGTSESATP | |
| | ESGPGSPAGSPTSTEEGSPAGSPTSTEEGSPAGSPTSTEEGTSESATPESGPGTSTEPS | |
| | EGSAPGGKPGGTSESATPESGPGSEPATSGSETPGTSESATPESGPGSEPATSGSETP | |
| | GTSESATPESGPGTSTEPSEGSAPGSPAGSPTSTEEGTSESATPESGPGSEPATSGSE | |
| | TPGTSESATPESGPGSPAGSPTSTEEGSPAGSPTSTEEGTSTEPSEGSAPGTSESATP | |
| | ESGPGTSESATPESGPGTSESATPESGPGSEPATSGSETPGSEPATSGSETPGSPAGS | |
| | PTSTEEGTSTEPSEGSAPGTSTEPSEGSAPGSEPATSGSETPGTSESATPESGPGTSTE | |
| | PSEGSAPGGKPGR | |
| Seg 18 | AGGKPGGSPAGSPTSTEEGTSESATPESGPGTSTEPSEGSAPGSPAGSPTSTEEGTST | 210 |
| | EPSEGSAPGTSTEPSEGSAPGTSESATPESGPGSEPATSGSETPGSEPATSGSETPGS | |
| | PAGSPTSTEEGTSESATPESGPGTSTEPSEGSAPGTSTEPSEGSAPGSPAGSPTSTEE | |
| | GTSTEPSEGSAPGTSTEPSEGSAPGTSESATPESGPGTSTEPSEGSAPGGKPGGTSES | |
| | ATPESGPGSEPATSGSETPGTSTEPSEGSAPGTSTEPSEGSAPGTSESATPESGPGTS | |
| | ESATPESGPGSPAGSPTSTEEGTSESATPESGPGSEPATSGSETPGTSESATPESGPG | |
| | TSTEPSEGSAPGTSTEPSEGSAPGTSTEPSEGSAPGTSTEPSEGSAPGTSTEPSEGSAP | |
| | GTSTEPSEGSAPGSPAGSPTSTEEGTSTEPSEGSAPGGKPGGTSESATPESGPGSEPA | |
| | TSGSETPGTSESATPESGPGSEPATSGSETPGTSESATPESGPGTSTEPSEGSAPGTS | |
| | ESATPESGPGSPAGSPTSTEEGSPAGSPTSTEEGSPAGSPTSTEEGTSESATPESGPG | |
| | TSTEPSEGSAPGTSESATPESGPGSEPATSGSETPGTSESATPESGPGSEPATSGSETP | |
| | GTSESATPESGPGTSTEPSEGSAPGGKPGGSPAGSPTSTEEGTSESATPESGPGSEPA | |
| | TSGSETPGTSESATPESGPGSPAGSPTSTEEGSPAGSPTSTEEGTSTEPSEGSAPGTS | |
| | ESATPESGPGTSESATPESGPGTSESATPESGPGSEPATSGSETPGSEPATSGSETPG | |
| | SPAGSPTSTEEGTSTEPSEGSAPGTSTEPSEGSAPGSEPATSGSETPGTSESATPESGP | |
| | GTSTEPSEGSAPGGKPGR | |
| Seg 19 | AGGKPGGSPAGSPTSTEEGTSESATPESGPGTSTEPSEGSAPGSPAGSPTSTEEGTST | 211 |
| | EPSEGSAPGTSTEPSEGSAPGTSESATPESGPGSEPATSGSETPGSEPATSGSETPGS | |
| | PAGSPTSTEEGTSESATPESGPGTSTEPSEGSAPGTSTEPSEGSAPGSPAGSPTSTEE | |
| | GTSTEGGKPGPSEGSAPGTSTEPSEGSAPGTSESATPESGPGTSTEPSEGSAPGTSES | |
| | ATPESGPGSEPATSGSETPGTSTEPSEGSAPGTSTEPSEGSAPGTSESATPESGPGTS | |
| | ESATPESGPGSPAGSPTSTEEGTSESATPESGPGSEPATSGSETPGTSESATPESGPG | |
| | TSTEPSEGSGGKPGAPGTSTEPSEGSAPGTSTEPSEGSAPGTSTEPSEGSAPGTSTEP | |
| | SEGSAPGTSTEPSEGSAPGSPAGSPTSTEEGTSTEPSEGSAPGTSESATPESGPGSEP | |
| | ATSGSETPGTSESATPESGPGSEPATSGSETPGTSESATPESGPGTSTEPSEGSAPGT | |
| | SESATPESGPGSGGKPGPAGSPTSTEEGSPAGSPTSTEEGSPAGSPTSTEEGTSESAT | |
| | PESGPGTSTEPSEGSAPGTSESATPESGPGSEPATSGSETPGTSESATPESGPGSEPA | |
| | TSGSETPGTSESATPESGPGTSTEPSEGSAPGSPAGSPTSTEEGTSESATPESGPGSEP | |
| | ATSGSETPGTSESATGGKPGPESGPGSPAGSPTSTEEGSPAGSPTSTEEGTSTEPSEG | |
| | SAPGTSESATPESGPGTSESATPESGPGTSESATPESGPGSEPATSGSETPGSEPATS | |
| | GSETPGSPAGSPTSTEEGTSTEPSEGSAPGTSTEPSEGSAPGSEPATSGSETPGTSES | |
| | ATPESGPGTSTEPSEGSAPGGKPGR | |
| Seg 20 | AGGKPGGSPAGSPTSTEEGTSESATPESGPGTSTEPSEGSAPGSPAGSPTSTEEGTST | 212 |
| | EPSEGSAPGTSTEPSEGSAPGTSESATPESGPGSEPATSGSETPGSEPATSGSETPGS | |
| | PAGSPTSTEEGTSESATPESGPGTSTEPSEGSAPGGKPGGTSTEPSEGSAPGSPAGSP | |
| | TSTEEGTSTEPSEGSAPGTSTEPSEGSAPGTSESATPESGPGTSTEPSEGSAPGTSES | |
| | ATPESGPGSEPATSGSETPGTSTEPSEGSAPGTSTEPSEGSAPGTSESATPESGPGTS | |
| | ESATPESGPGGKPGGSPAGSPTSTEEGTSESATPESGPGSEPATSGSETPGTSESATP | |
| | ESGPGTSTEPSEGSAPGTSTEPSEGSAPGTSTEPSEGSAPGTSTEPSEGSAPGTSTEPS | |
| | EGSAPGTSTEPSEGSAPGSPAGSPTSTEEGTSTEPSEGSAPGGKPGGTSESATPESGP | |
| | GSEPATSGSETPGTSESATPESGPGSEPATSGSETPGTSESATPESGPGTSTEPSEGS | |
| | APGTSESATPESGPGSPAGSPTSTEEGSPAGSPTSTEEGSPAGSPTSTEEGTSESATP | |
| | ESGPGTSTEPSEGSAPGGKPGGTSESATPESGPGSEPATSGSETPGTSESATPESGPG | |
| | SEPATSGSETPGTSESATPESGPGTSTEPSEGSAPGSPAGSPTSTEEGTSESATPESGP | |
| | GSEPATSGSETPGTSESATPESGPGSPAGSPTSTEEGSPAGSPTSTEEGGKPGGTSTE | |
| | PSEGSAPGTSESATPESGPGTSESATPESGPGTSESATPESGPGSEPATSGSETPGSE | |
| | PATSGSETPGSPAGSPTSTEEGTSTEPSEGSAPGTSTEPSEGSAPGSEPATSGSETPG | |
| | TSESATPESGPGTSTEPSEGSAPGGKPGR | |
| Seg 21 | AGGKPGGSPAGSPTSTEEGTSESATPESGPGTSTEPSEGSAPGSPAGSPTSTEEGTST | 213 |
| | EPSEGSAPGTSTEPSEGSAPGTSESATPESGPGSEPATSGSETPGSEPATSGSETPGS | |
| | PAGSPTSTEEGTSGGKPGESATPESGPGTSTEPSEGSAPGTSTEPSEGSAPGSPAGSP | |
| | TSTEEGTSTEPSEGSAPGTSTEPSEGSAPGTSESATPESGPGTSTEPSEGSAPGTSES | |
| | ATPESGPGSEPATSGSETPGTSTEPSGGKPGEGSAPGTSTEPSEGSAPGTSESATPES | |
| | GPGTSESATPESGPGSPAGSPTSTEEGTSESATPESGPGSEPATSGSETPGTSESATP | |
| | ESGPGTSTEPSEGSAPGTSTEPSEGSAPGTSTEPSEGSGGKPGAPGTSTEPSEGSAPG | |
| | TSTEPSEGSAPGTSTEPSEGSAPGSPAGSPTSTEEGTSTEPSEGSAPGTSESATPESGP | |
| | GSEPATSGSETPGTSESATPESGPGSEPATSGSETPGTSESATPESGPGTGGKPGSTE | |
| | PSEGSAPGTSESATPESGPGSPAGSPTSTEEGSPAGSPTSTEEGSPAGSPTSTEEGTS | |
| | ESATPESGPGTSTEPSEGSAPGTSESATPESGPGSEPATSGSETPGTSESATPESGPG | |
| | SEPAGGKPGTSGSETPGTSESATPESGPGTSTEPSEGSAPGSPAGSPTSTEEGTSESA | |
| | TPESGPGSEPATSGSETPGTSESATPESGPGSPAGSPTSTEEGSPAGSPTSTEEGTST | |
| | EPSEGSAPGTSESATPEGGKPGSGPGTSESATPESGPGTSESATPESGPGSEPATSGS | |
| | ETPGSEPATSGSETPGSPAGSPTSTEEGTSTEPSEGSAPGTSTEPSEGSAPGSEPATS | |
| | GSETPGTSESATPESGPGTSTEPSEGSAPGGKPGR | |
| Seg 22 | AGGKPGGSPAGSPTSTEEGTSESATPESGPGTSTEPSEGSAPGSPAGSPTSTEEGTST | 214 |
| | EPSEGSAPGTSTEPSEGSAPGTSESATPESGPGSEPATSGSETPGSEPATSGSETPGS | |
| | PAGSPTSTEEGTSESATPESGPGTSTEPSEGSAPGTSTEPSEGSAPGSPAGSPTSTEE | |
| | GTSTEPSEGSAPGTSTEPSEGSAPGTSESATPESGPGTSTEPSEGSAPGTSESATPES | |
| | GPGSEPATSGSETPGTSTEPSEGSAPGTSTEPSEGSAPGTSESATPESGPGTSESATP | |
| | ESGPGSPAGSPTSTEEGTSESATPESGPGSEPATSGSETPGTSESATPESGPGTSTEPS | |
| | EGSAPGTSTEPSEGSAPGTSTEPSEGSAPGTSTEPSEGSAPGTSTEPSEGSAPGTSTE | |
| | PSEGSAPGSPAGSPTSTEEGTSTEPSEGSAPGTSESATPESGPGSEPATSGSETPGTS | |
| | ESATPESGPGSEPATSGSETPGTSESATPESGPGTSTEPSEGSAPGTSESATPESGPG | |
| | SPAGSPTSTEEGSPAGSPTSTEEGSPAGSPTSTEEGTSESATPESGPGTSTEPSEGSAP | |
| | GTSESATPESGPGSEPATSGSETPGTSESATPESGPGSEPATSGSETPGTSESATPES | |
| | GPGTSTEPSEGSAPGSPAGSPTSTEEGTSESATPESGPGSEPATSGSETPGTSESATP | |
| | ESGPGSPAGSPTSTEEGSPAGSPTSTEEGTSTEPSEGSAPGTSESATPESGPGTSESA | |
| | TPESGPGTSESATPESGPGSEPATSGSETPGSEPATSGSETPGSPAGSPTSTEEGTST | |
| | EPSEGSAPGTSTEPSEGSAPGSEPATSGSETPGTSESATPESGPGTSTEPSEGSAPR | |
| Seg 23 | AGSPAGSPTSTEEGTSESATPESGPGTSTEPSEGSAPGSPAGSPTSTEEGTSTEPSEG | 215 |
| | SAPGTSTEPSEGSAPGTSESATPESGPGSEPATSGSETPGSEPATSGSETPGSPAGSP | |
| | TSTEEGTSESATPESGPGTSTEPSEGSAPGTSTEPSEGSAPGSPAGSPTSTEEGTSTEP | |
| | SEGSAPGTSTEPSEGSAPGTSESATPESGPGTSTEPSEGSAPGTSESATPESGPGSEP | |
| | ATSGSETPGTSTEPSEGSAPGTSTEPSEGSAPGTSESATPESGPGTSESATPESGPGS | |
| | PAGSPTSTEEGTSESATPESGPGSEPATSGSETPGTSESATPESGPGTSTEPSEGSAP | |
| | GTSTEPSEGSAPGTSTEPSEGSAPGTSTEPSEGSAPGTSTEPSEGSAPGTSTEPSEGS | |
| | APGSPAGSPTSTEEGTSTEPSEGSAPGTSESATPESGPGSEPATSGSETPGTSESATP | |
| | ESGPGSEPATSGSETPGTSESATPESGPGTSTEPSEGSAPGTSESATPESGPGSPAGS | |
| | PTSTEEGSPAGSPTSTEEGSPAGSPTSTEEGTSESATPESGPGTSTEPSEGSAPGTSES | |
| | ATPESGPGSEPATSGSETPGTSESATPESGPGSEPATSGSETPGTSESATPESGPGTS | |
| | TEPSEGSAPGSPAGSPTSTEEGTSESATPESGPGSEPATSGSETPGTSESATPESGPG | |
| | SPAGSPTSTEEGSPAGSPTSTEEGTSTEPSEGSAPGTSESATPESGPGTSESATPESGP | |
| | GTSESATPESGPGSEPATSGSETPGSEPATSGSETPGSPAGSPTSTEEGTSTEPSEGS | |
| | APGTSTEPSEGSAPGSEPATSGSETPGTSESATPESGPGTSTEPSEGSAPGGKPGR | |
| Seg 24 | AGGKPGGSPAGSPTSTEEGTSESATPESGPGTSTEPSEGSAPGSPAGSPTSTEEGTST | 216 |
| | EPSEGSAPGTSTEPSEGSAPGTSESATPESGPGSEPATSGSETPGSEPATSGSETPGS | |
| | PAGSPTSTEEGTSESATPESGPGTSTEPSEGSAPGTSTEPSEGSAPGSPAGSPTSTEE | |
| | GTSTEPSEGSAPGTSTEPSEGSAPGTSESATPESGPGTSTEPSEGSAPGTSESATPES | |
| | GPGSEPATSGSETPGTSTEPSEGSAPGTSTEPSEGSAPGTSESATPESGPGTSESATP | |
| | ESGPGSPAGSPTSTEEGTSESATPESGPGSEPATSGSETPGTSESATPESGPGTSTEPS | |
| | EGSAPGTSTEPSEGSAPGTSTEPSEGSAPGTSTEPSEGSAPGTSTEPSEGSAPGTSTE | |
| | PSEGSAPGSPAGSPTSTEEGTSTEPSEGSAPGGKPGGTSESATPESGPGSEPATSGSE | |
| | TPGTSESATPESGPGSEPATSGSETPGTSESATPESGPGTSTEPSEGSAPGTSESATP | |
| | ESGPGSPAGSPTSTEEGSPAGSPTSTEEGSPAGSPTSTEEGTSESATPESGPGTSTEPS | |
| | EGSAPGTSESATPESGPGSEPATSGSETPGTSESATPESGPGSEPATSGSETPGTSES | |
| | ATPESGPGTSTEPSEGSAPGSPAGSPTSTEEGTSESATPESGPGSEPATSGSETPGTS | |
| | ESATPESGPGSPAGSPTSTEEGSPAGSPTSTEEGTSTEPSEGSAPGTSESATPESGPG | |
| | TSESATPESGPGTSESATPESGPGSEPATSGSETPGSEPATSGSETPGSPAGSPTSTEE | |
| | GTSTEPSEGSAPGTSTEPSEGSAPGSEPATSGSETPGTSESATPESGPGTSTEPSEGS | |
| | APR | |
| Seg 25 | AGSPAGSPTSTEEGTSESATPESGPGTSTEPSEGSAPGSPAGSPTSTEEGTSTEPSEG | 217 |
| | SAPGTSTEPSEGSAPGTSESATPESGPGSEPATSGSETPGSEPATSGSETPGSPAGSP | |
| | TSTEEGTSESATPESGPGTSTEPSEGSAPGTSTEPSEGSAPGSPAGSPTSTEEGTSTEP | |
| | SEGSAPGTSTEPSEGSAPGTSESATPESGPGTSTEPSEGSAPGTSESATPESGPGSEP | |
| | ATSGSETPGTSTEPSEGSAPGTSTEPSEGSAPGTSESATPESGPGTSESATPESGPGS | |
| | PAGSPTSTEEGTSESATPESGPGSEPATSGSETPGTSESATPESGPGTSTEPSEGSAP | |
| | GTSTEPSEGSAPGTSTEPSEGSAPGTSTEPSEGSAPGTSTEPSEGSAPGTSTGGKPGE | |
| | PSEGSAPGSPAGSPTSTEEGTSTEPSEGSAPGTSESATPESGPGSEPATGGKPGSGSE | |
| | TPGTSESATPESGPGSEPATSGSETPGTSESATPESGPGTSTEPSEGSAPGTSESATP | |
| | ESGPGSPAGSPTSTEEGSPAGSPTSTEEGSPAGSPTSTEEGTSESATPESGPGTSTEPS | |
| | EGSAPGTSESATPESGPGSEPATSGSETPGTSESATPESGPGSEPATSGSETPGTSES | |
| | ATPESGPGTSTEPSEGSAPGSPAGSPTSTEEGTSESATPESGPGSEPATSGSETPGTS | |
| | ESATPESGPGSPAGSPTSTEEGSPAGSPTSTEEGTSTEPSEGSAPGTSESATPESGPG | |
| | TSESATPESGPGTSESATPESGPGSEPATSGSETPGSEPATSGSETPGSPAGSPTSTEE | |
| | GTSTEPSEGSAPGTSTEPSEGSAPGSEPATSGSETPGTSESATPESGPGTSTEPSEGS | |
| | APR | |
| Seg 26 | AGSPAGSPTSTEEGTSESATPESGPGTSTEPSEGSAPGSPAGSPTSTEEGTSTEPSEG | 218 |
| | SAPGTSTEPSEGSAPGTSESATPESGPGSEPATSGSETPGSEPATSGSETPGSPAGSP | |
| | TSTEEGTSESATPESGPGTSTEPSEGSAPGTSTEPSEGSAPGSPAGSPTSTEEGTSTEP | |
| | SEGSAPGTSTEPSEGSAPGTSESATPESGPGTSTEPSEGSAPGTSESATPESGPGSEP | |
| | ATSGSETPGTSTEPSEGSAPGTSTEPSEGSAPGTSESATPESGPGTSESATPESGPGS | |
| | PAGSPTSTEEGTSESATPESGPGSEPATSGSETPGTSESATPESGPGTSTEPSEGSAP | |
| | GTSTEPSEGSAPGTSTEPSEGSAPGTSTEPSEGSAPGTSTEPSEGSAPGTSTEPSEGS | |
| | APGSPAGSPTSTEEGTSTEPSEGSAPGGKPGGTSESATPESGPGSEPATSGSETPGTS | |
| | ESATPESGPGSEPATSGSETPGTSESATPESGPGTSTEPSEGSAPGTSESATPESGPG | |
| | SPAGSPTSTEEGSPAGSPTSTEEGSPAGSPTSTEEGTSESATPESGPGTSTEPSEGSAP | |
| | GTSESATPESGPGSEPATSGSETPGTSESATPESGPGSEPATSGSETPGTSESATPES | |
| | GPGTSTEPSEGSAPGSPAGSPTSTEEGTSESATPESGPGSEPATSGSETPGTSESATP | |
| | ESGPGSPAGSPTSTEEGSPAGSPTSTEEGTSTEPSEGSAPGTSESATPESGPGTSESA | |
| | TPESGPGTSESATPESGPGSEPATSGSETPGSEPATSGSETPGSPAGSPTSTEEGTST | |
| | EPSEGSAPGTSTEPSEGSAPGSEPATSGSETPGTSESATPESGPGTSTEPSEGSAPGG | |
| | KPGR | |
| Seg 27 | AEATTAAGGAGSPAGSPTSTEEGTSESATPESGPGTSTEPSEGSAPGSPAGSPTSTE | 219 |
| | EGTSTEPSEGSAPGTSTEPSEGSAPGTSESATPESGPGSEPATSGSETPGSEPATSGS | |
| | ETPGSPAGSPTSTEEGTSESATPESGPGTSTEPSEGSAPGTSTEPSEGSAPGSPAGSP | |
| | TSTEEGTSTEPSEGSAPGTSTEPSEGSAPGTSESATPESGPGTSTEPSEGSAPGTSES | |
| | ATPESGPGSEPATSGSETPGTSTEPSEGSAPGTSTEPSEGSAPGTSESATPESGPGTS | |
| | ESATPESGPGSPAGSPTSTEEGTSESATPESGPGSEPATSGSETPGTSESATPESGPG | |
| | TSTEPSEGSAPGTSTEPSEGSAPGTSTEPSEGSAPGTSTEPSEGSAPGTSTEPSEGSAP | |
| | GTSTEPSEGSAPGSPAGSPTSTEEGTSTEPSEGSAPTAEAAGCGTAEAAGTSESATP | |
| | ESGPGSEPATSGSETPGTSESATPESGPGSEPATSGSETPGTSESATPESGPGTSTEPS | |
| | EGSAPGTSESATPESGPGSPAGSPTSTEEGSPAGSPTSTEEGSPAGSPTSTEEGTSES | |
| | ATPESGPGTSTEPSEGSAPGTSESATPESGPGSEPATSGSETPGTSESATPESGPGSE | |
| | PATSGSETPGTSESATPESGPGTSTEPSEGSAPGSPAGSPTSTEEGTSESATPESGPG | |
| | SEPATSGSETPGTSESATPESGPGSPAGSPTSTEEGSPAGSPTSTEEGTSTEPSEGSAP | |
| | GTSESATPESGPGTSESATPESGPGTSESATPESGPGSEPATSGSETPGSEPATSGSE | |
| | TPGSPAGSPTSTEEGTSTEPSEGSAPGTSTEPSEGSAPGSEPATSGSETPGTSESATP | |
| | ESGPGTSTEPSEGSAPR | |
| Seg 28 | AEATTAAGGATAEAAGCGTAEAAGSPAGSPTSTEEGTSESATPESGPGTSTEPSEG | 220 |
| | SAPGSPAGSPTSTEEGTSTEPSEGSAPGTSTEPSEGSAPGTSESATPESGPGSEPATS | |
| | GSETPGSEPATSGSETPGSPAGSPTSTEEGTSESATPESGPGTSTEPSEGSAPGTSTE | |
| | PSEGSAPGSPAGSPTSTEEGTSTEPSEGSAPGTSTEPSEGSAPGTSESATPESGPGTS | |
| | TEPSEGSAPGTSESATPESGPGSEPATSGSETPGTSTEPSEGSAPGTSTEPSEGSAPG | |
| | TSESATPESGPGTSESATPESGPGSPAGSPTSTEEGTSESATPESGPGSEPATSGSETP | |
| | GTSESATPESGPGTSTEPSEGSAPGTSTEPSEGSAPGTSTEPSEGSAPGTSTEPSEGS | |
| | APGTSTEPSEGSAPGTSTEPSEGSAPGSPAGSPTSTEEGTSTEPSEGSAPGTSESATP | |
| | ESGPGSEPATSGSETPGTSESATPESGPGSEPATSGSETPGTSESATPESGPGTSTEPS | |
| | EGSAPGTSESATPESGPGSPAGSPTSTEEGSPAGSPTSTEEGSPAGSPTSTEEGTSES | |
| | ATPESGPGTSTEPSEGSAPGTSESATPESGPGSEPATSGSETPGTSESATPESGPGSE | |
| | PATSGSETPGTSESATPESGPGTSTEPSEGSAPGSPAGSPTSTEEGTSESATPESGPG | |
| | SEPATSGSETPGTSESATPESGPGSPAGSPTSTEEGSPAGSPTSTEEGTSTEPSEGSAP | |
| | GTSESATPESGPGTSESATPESGPGTSESATPESGPGSEPATSGSETPGSEPATSGSE | |
| | TPGSPAGSPTSTEEGTSTEPSEGSAPGTSTEPSEGSAPGSEPATSGSETPGTSESATP | |
| | ESGPGTSTEPSEGSAPTAEAAGCGTAEAAR | |
| Seg 29 | AEATTAAGGATAEAAGCGTAEAAGSPAGSPTSTEEGTSESATPESGPGTSTEPSEG | 221 |
| | SAPGSPAGSPTSTEEGTSTEPSEGSAPGTSTEPSEGSAPGTSESATPESGPGSEPATS | |
| | GSETPGSEPATSGSETPGSPAGSPTSTEEGTSESATPESGPGTSTEPSEGSAPGTSTE | |
| | PSEGSAPGSPAGSPTSTEEGTSTEPSEGSAPGTSTEPSEGSAPGTSESATPESGPGTS | |
| | TEPSEGSAPGTSESATPESGPGSEPATSGSETPGTSTEPSEGSAPGTSTEPSEGSAPG | |
| | TSESATPESGPGTSESATPESGPGSPAGSPTSTEEGTSESATPESGPGSEPATSGSETP | |
| | GTSESATPESGPGTSTEPSEGSAPGTSTEPSEGSAPGTSTEPSEGSAPGTSTEPSEGS | |
| | APGTSTEPSEGSAPGTSTEPSEGSAPGSPAGSPTSTEEGTSTEPSEGSAPTAEAAGC | |
| | GTAEAAGTSESATPESGPGSEPATSGSETPGTSESATPESGPGSEPATSGSETPGTSE | |
| | SATPESGPGTSTEPSEGSAPGTSESATPESGPGSPAGSPTSTEEGSPAGSPTSTEEGS | |
| | PAGSPTSTEEGTSESATPESGPGTSTEPSEGSAPGTSESATPESGPGSEPATSGSETP | |
| | GTSESATPESGPGSEPATSGSETPGTSESATPESGPGTSTEPSEGSAPGSPAGSPTST | |
| | EEGTSESATPESGPGSEPATSGSETPGTSESATPESGPGSPAGSPTSTEEGSPAGSPT | |
| | STEEGTSTEPSEGSAPGTSESATPESGPGTSESATPESGPGTSESATPESGPGSEPAT | |
| | SGSETPGSEPATSGSETPGSPAGSPTSTEEGTSTEPSEGSAPGTSTEPSEGSAPGSEP | |
| | ATSGSETPGTSESATPESGPGTSTEPSEGSAPTAEAAGCGTAEAAR | |
| Seg 30 | AEATTAAGGATAEAAGCGTAEAAGSPAGSPTSTEEGTSESATPESGPGTSTEPSEG | 222 |
| | SAPGSPAGSPTSTEEGTSTEPSEGSAPGTSTEPSEGSAPGTSESATPESGPGSEPATS | |
| | GSETPGSEPATSGSETPGSPAGSPTSTEEGTSESATPESGPGTSTEPSEGSAPGTSTE | |
| | PSEGSAPGSPAGSPTSTEEGTSTEPSEGSAPGTSTEPSEGSAPGTSESATPESGPGTS | |
| | TEPSEGSAPGTSESATPESGPGSEPATSGSETPGTSTEPSEGSAPGTSTEPSEGSAPG | |
| | TSESATPESGPGTSESATPESGPTAEAAGCGTAEAAGSPAGSPTSTEEGTSESATPE | |
| | SGPGSEPATSGSETPGTSESATPESGPGTSTEPSEGSAPGTSTEPSEGSAPGTSTEPSE | |
| | GSAPGTSTEPSEGSAPGTSTEPSEGSAPGTSTEPSEGSAPGSPAGSPTSTEEGTSTEP | |
| | SEGSAPGTSESATPESGPGSEPATSGSETPGTSESATPESGPGSEPATSGSETPGTSE | |
| | SATPESGPGTSTEPSEGSAPGTSESATPESGPGSPAGSPTSTEEGSPAGSPTSTEEGS | |
| | PAGSPTSTEEGTSESATPESGPGTSTEPSEGSAPTAEAAGCGTAEAAGTSESATPES | |
| | GPGSEPATSGSETPGTSESATPESGPGSEPATSGSETPGTSESATPESGPGTSTEPSE | |
| | GSAPGSPAGSPTSTEEGTSESATPESGPGSEPATSGSETPGTSESATPESGPGSPAGS | |
| | PTSTEEGSPAGSPTSTEEGTSTEPSEGSAPGTSESATPESGPGTSESATPESGPGTSES | |
| | ATPESGPGSEPATSGSETPGSEPATSGSETPGSPAGSPTSTEEGTSTEPSEGSAPGTS | |
| | TEPSEGSAPGSEPATSGSETPGTSESATPESGPGTSTEPSEGSAPTAEAAGCGTAEA | |
| | AR | |
| Seg 31 | ATGTATSEGSPEGSPAGSPTSTEEGTSESATPESGPGTSTEPSEGSAPGSPAGSPTST | 223 |
| | EEGTSTEPSEGSAPGTSTEPSEGSAPGTSESATPESGPGSEPATSGSETPGSEPATSG | |
| | SETPGSPAGSPTSTEEGTSESATPESGPGTSTEPSEGSAPGTSTEPSEGSAPGSPAGS | |
| | PTSTEEGTSTEPSEGSAPGTSTEPSEGSAPGTSESATPESGPGTSTEPSEGSAPGTSES | |
| | ATPESGPGSEPATSGSETPGTSTEPSEGSAPGTSTEPSEGSAPGTSESATPESGPGTS | |
| | ESATPESGPGSPAGSPTSTEEGTSESATPESGPGSEPATSGSETPGTSESATPESGPG | |
| | TSTEPSEGSAPGTSTEPSEGSAPGTSTEPSEGSAPGTSTEPSEGSAPGTSTEPSEGSAP | |
| | GTSTEPSEGSAPGSPAGSPTSTEEGTSTEPSEGSAPTAEAAGCGTAEAAGTSESATP | |
| | ESGPGSEPATSGSETPGTSESATPESGPGSEPATSGSETPGTSESATPESGPGTSTEPS | |
| | EGSAPGTSESATPESGPGSPAGSPTSTEEGSPAGSPTSTEEGSPAGSPTSTEEGTSES | |
| | ATPESGPGTSTEPSEGSAPGTSESATPESGPGSEPATSGSETPGTSESATPESGPGSE | |
| | PATSGSETPGTSESATPESGPGTSTEPSEGSAPGSPAGSPTSTEEGTSESATPESGPG | |
| | SEPATSGSETPGTSESATPESGPGSPAGSPTSTEEGSPAGSPTSTEEGTSTEPSEGSAP | |
| | GTSESATPESGPGTSESATPESGPGTSESATPESGPGSEPATSGSETPGSEPATSGSE | |
| | TPGSPAGSPTSTEEGTSTEPSEGSAPGTSTEPSEGSAPGSEPATSGSETPGTSESATP | |
| | ESGPGTSTEPSEGSAPR | |
| Seg 32 | ATGTATSEGSPETAEAAGCGTAEAAGSPAGSPTSTEEGTSESATPESGPGTSTEPSE | 224 |
| | GSAPGSPAGSPTSTEEGTSTEPSEGSAPGTSTEPSEGSAPGTSESATPESGPGSEPAT | |
| | SGSETPGSEPATSGSETPGSPAGSPTSTEEGTSESATPESGPGTSTEPSEGSAPGTST | |
| | EPSEGSAPGSPAGSPTSTEEGTSTEPSEGSAPGTSTEPSEGSAPGTSESATPESGPGT | |
| | STEPSEGSAPGTSESATPESGPGSEPATSGSETPGTSTEPSEGSAPGTSTEPSEGSAP | |
| | GTSESATPESGPGTSESATPESGPGSPAGSPTSTEEGTSESATPESGPGSEPATSGSE | |
| | TPGTSESATPESGPGTSTEPSEGSAPGTSTEPSEGSAPGTSTEPSEGSAPGTSTEPSE | |
| | GSAPGTSTEPSEGSAPGTSTEPSEGSAPGSPAGSPTSTEEGTSTEPSEGSAPGTSESA | |
| | TPESGPGSEPATSGSETPGTSESATPESGPGSEPATSGSETPGTSESATPESGPGTST | |
| | EPSEGSAPGTSESATPESGPGSPAGSPTSTEEGSPAGSPTSTEEGSPAGSPTSTEEGT | |
| | SESATPESGPGTSTEPSEGSAPGTSESATPESGPGSEPATSGSETPGTSESATPESGP | |
| | GSEPATSGSETPGTSESATPESGPGTSTEPSEGSAPGSPAGSPTSTEEGTSESATPES | |
| | GPGSEPATSGSETPGTSESATPESGPGSPAGSPTSTEEGSPAGSPTSTEEGTSTEPSE | |
| | GSAPGTSESATPESGPGTSESATPESGPGTSESATPESGPGSEPATSGSETPGSEPAT | |
| | SGSETPGSPAGSPTSTEEGTSTEPSEGSAPGTSTEPSEGSAPGSEPATSGSETPGTSES | |
| | ATPESGPGTSTEPSEGSAPTAEAAGCGTAEAAR | |
| Seg 33 | ATGTATSEGSPETAEAAGCGTAEAAGSPAGSPTSTEEGTSESATPESGPGTSTEPSE | 225 |
| | GSAPGSPAGSPTSTEEGTSTEPSEGSAPGTSTEPSEGSAPGTSESATPESGPGSEPAT | |
| | SGSETPGSEPATSGSETPGSPAGSPTSTEEGTSESATPESGPGTSTEPSEGSAPGTST | |
| | EPSEGSAPGSPAGSPTSTEEGTSTEPSEGSAPGTSTEPSEGSAPGTSESATPESGPGT | |
| | STEPSEGSAPGTSESATPESGPGSEPATSGSETPGTSTEPSEGSAPGTSTEPSEGSAP | |
| | GTSESATPESGPGTSESATPESGPGSPAGSPTSTEEGTSESATPESGPGSEPATSGSE | |
| | TPGTSESATPESGPGTSTEPSEGSAPGTSTEPSEGSAPGTSTEPSEGSAPGTSTEPSE | |
| | GSAPGTSTEPSEGSAPGTSTEPSEGSAPGSPAGSPTSTEEGTSTEPSEGSAPTAEAAG | |
| | CGTAEAAGTSESATPESGPGSEPATSGSETPGTSESATPESGPGSEPATSGSETPGTS | |
| | ESATPESGPGTSTEPSEGSAPGTSESATPESGPGSPAGSPTSTEEGSPAGSPTSTEEG | |
| | SPAGSPTSTEEGTSESATPESGPGTSTEPSEGSAPGTSESATPESGPGSEPATSGSETP | |
| | GTSESATPESGPGSEPATSGSETPGTSESATPESGPGTSTEPSEGSAPGSPAGSPTST | |
| | EEGTSESATPESGPGSEPATSGSETPGTSESATPESGPGSPAGSPTSTEEGSPAGSPT | |
| | STEEGTSTEPSEGSAPGTSESATPESGPGTSESATPESGPGTSESATPESGPGSEPAT | |
| | SGSETPGSEPATSGSETPGSPAGSPTSTEEGTSTEPSEGSAPGTSTEPSEGSAPGSEP | |
| | ATSGSETPGTSESATPESGPGTSTEPSEGSAPTAEAAGCGTAEAAR | |
| Seg 34 | ATGTATSEGSPETAEAAGCGTAEAAGSPAGSPTSTEEGTSESATPESGPGTSTEPSE | 226 |
| | GSAPGSPAGSPTSTEEGTSTEPSEGSAPGTSTEPSEGSAPGTSESATPESGPGSEPAT | |
| | SGSETPGSEPATSGSETPGSPAGSPTSTEEGTSESATPESGPGTSTEPSEGSAPGTST | |
| | EPSEGSAPGSPAGSPTSTEEGTSTEPSEGSAPGTSTEPSEGSAPGTSESATPESGPGT | |
| | STEPSEGSAPGTSESATPESGPGSEPATSGSETPGTSTEPSEGSAPGTSTEPSEGSAP | |
| | GTSESATPESGPGTSESATPESGPTAEAAGCGTAEAAGSPAGSPTSTEEGTSESATP | |
| | ESGPGSEPATSGSETPGTSESATPESGPGTSTEPSEGSAPGTSTEPSEGSAPGTSTEPS | |
| | EGSAPGTSTEPSEGSAPGTSTEPSEGSAPGTSTEPSEGSAPGSPAGSPTSTEEGTSTE | |
| | PSEGSAPGTSESATPESGPGSEPATSGSETPGTSESATPESGPGSEPATSGSETPGTS | |
| | ESATPESGPGTSTEPSEGSAPGTSESATPESGPGSPAGSPTSTEEGSPAGSPTSTEEG | |
| | SPAGSPTSTEEGTSESATPESGPGTSTEPSEGSAPTAEAAGCGTAEAAGTSESATPE | |
| | SGPGSEPATSGSETPGTSESATPESGPGSEPATSGSETPGTSESATPESGPGTSTEPSE | |
| | GSAPGSPAGSPTSTEEGTSESATPESGPGSEPATSGSETPGTSESATPESGPGSPAGS | |
| | PTSTEEGSPAGSPTSTEEGTSTEPSEGSAPGTSESATPESGPGTSESATPESGPGTSES | |
| | ATPESGPGSEPATSGSETPGSEPATSGSETPGSPAGSPTSTEEGTSTEPSEGSAPGTS | |
| | TEPSEGSAPGSEPATSGSETPGTSESATPESGPGTSTEPSEGSAPTAEAAGCGTAEA | |
| | AR | |
| Seg 35 | EPTAATTGESAGGSPAGSPTSTEEGTSESATPESGPGTSTEPSEGSAPGSPAGSPTST | 227 |
| | EEGTSTEPSEGSAPGTSTEPSEGSAPGTSESATPESGPGSEPATSGSETPGSEPATSG | |
| | SETPGSPAGSPTSTEEGTSESATPESGPGTSTEPSEGSAPGTSTEPSEGSAPGSPAGS | |
| | PTSTEEGTSTEPSEGSAPGTSTEPSEGSAPGTSESATPESGPGTSTEPSEGSAPGTSES | |
| | ATPESGPGSEPATSGSETPGTSTEPSEGSAPGTSTEPSEGSAPGTSESATPESGPGTS | |
| | ESATPESGPGSPAGSPTSTEEGTSESATPESGPGSEPATSGSETPGTSESATPESGPG | |
| | TSTEPSEGSAPGTSTEPSEGSAPGTSTEPSEGSAPGTSTEPSEGSAPGTSTEPSEGSAP | |
| | GTSTEPSEGSAPGSPAGSPTSTEEGTSTEPSEGSAPTAEAAGCGTAEAAGTSESATP | |
| | ESGPGSEPATSGSETPGTSESATPESGPGSEPATSGSETPGTSESATPESGPGTSTEPS | |
| | EGSAPGTSESATPESGPGSPAGSPTSTEEGSPAGSPTSTEEGSPAGSPTSTEEGTSES | |
| | ATPESGPGTSTEPSEGSAPGTSESATPESGPGSEPATSGSETPGTSESATPESGPGSE | |
| | PATSGSETPGTSESATPESGPGTSTEPSEGSAPGSPAGSPTSTEEGTSESATPESGPG | |
| | SEPATSGSETPGTSESATPESGPGSPAGSPTSTEEGSPAGSPTSTEEGTSTEPSEGSAP | |
| | GTSESATPESGPGTSESATPESGPGTSESATPESGPGSEPATSGSETPGSEPATSGSE | |
| | TPGSPAGSPTSTEEGTSTEPSEGSAPGTSTEPSEGSAPGSEPATSGSETPGTSESATP | |
| | ESGPGTSTEPSEGSAPR | |
| Seg 36 | EPTAATTGESAGTAEAAGCGTAEAAGSPAGSPTSTEEGTSESATPESGPGTSTEPS | 228 |
| | EGSAPGSPAGSPTSTEEGTSTEPSEGSAPGTSTEPSEGSAPGTSESATPESGPGSEPA | |
| | TSGSETPGSEPATSGSETPGSPAGSPTSTEEGTSESATPESGPGTSTEPSEGSAPGTS | |
| | TEPSEGSAPGSPAGSPTSTEEGTSTEPSEGSAPGTSTEPSEGSAPGTSESATPESGPG | |
| | TSTEPSEGSAPGTSESATPESGPGSEPATSGSETPGTSTEPSEGSAPGTSTEPSEGSAP | |
| | GTSESATPESGPGTSESATPESGPGSPAGSPTSTEEGTSESATPESGPGSEPATSGSE | |
| | TPGTSESATPESGPGTSTEPSEGSAPGTSTEPSEGSAPGTSTEPSEGSAPGTSTEPSE | |
| | GSAPGTSTEPSEGSAPGTSTEPSEGSAPGSPAGSPTSTEEGTSTEPSEGSAPGTSESA | |
| | TPESGPGSEPATSGSETPGTSESATPESGPGSEPATSGSETPGTSESATPESGPGTST | |
| | EPSEGSAPGTSESATPESGPGSPAGSPTSTEEGSPAGSPTSTEEGSPAGSPTSTEEGT | |
| | SESATPESGPGTSTEPSEGSAPGTSESATPESGPGSEPATSGSETPGTSESATPESGP | |
| | GSEPATSGSETPGTSESATPESGPGTSTEPSEGSAPGSPAGSPTSTEEGTSESATPES | |
| | GPGSEPATSGSETPGTSESATPESGPGSPAGSPTSTEEGSPAGSPTSTEEGTSTEPSE | |
| | GSAPGTSESATPESGPGTSESATPESGPGTSESATPESGPGSEPATSGSETPGSEPAT | |
| | SGSETPGSPAGSPTSTEEGTSTEPSEGSAPGTSTEPSEGSAPGSEPATSGSETPGTSES | |
| | ATPESGPGTSTEPSEGSAPTAEAAGCGTAEAAR | |
| Seg 37 | EPTAATTGESAGTAEAAGCGTAEAAGSPAGSPTSTEEGTSESATPESGPGTSTEPS | 229 |
| | EGSAPGSPAGSPTSTEEGTSTEPSEGSAPGTSTEPSEGSAPGTSESATPESGPGSEPA | |
| | TSGSETPGSEPATSGSETPGSPAGSPTSTEEGTSESATPESGPGTSTEPSEGSAPGTS | |
| | TEPSEGSAPGSPAGSPTSTEEGTSTEPSEGSAPGTSTEPSEGSAPGTSESATPESGPG | |
| | TSTEPSEGSAPGTSESATPESGPGSEPATSGSETPGTSTEPSEGSAPGTSTEPSEGSAP | |
| | GTSESATPESGPGTSESATPESGPGSPAGSPTSTEEGTSESATPESGPGSEPATSGSE | |
| | TPGTSESATPESGPGTSTEPSEGSAPGTSTEPSEGSAPGTSTEPSEGSAPGTSTEPSE | |
| | GSAPGTSTEPSEGSAPGTSTEPSEGSAPGSPAGSPTSTEEGTSTEPSEGSAPTAEAAG | |
| | CGTAEAAGTSESATPESGPGSEPATSGSETPGTSESATPESGPGSEPATSGSETPGTS | |
| | ESATPESGPGTSTEPSEGSAPGTSESATPESGPGSPAGSPTSTEEGSPAGSPTSTEEG | |
| | SPAGSPTSTEEGTSESATPESGPGTSTEPSEGSAPGTSESATPESGPGSEPATSGSETP | |
| | GTSESATPESGPGSEPATSGSETPGTSESATPESGPGTSTEPSEGSAPGSPAGSPTST | |
| | EEGTSESATPESGPGSEPATSGSETPGTSESATPESGPGSPAGSPTSTEEGSPAGSPT | |
| | STEEGTSTEPSEGSAPGTSESATPESGPGTSESATPESGPGTSESATPESGPGSEPAT | |
| | SGSETPGSEPATSGSETPGSPAGSPTSTEEGTSTEPSEGSAPGTSTEPSEGSAPGSEP | |
| | ATSGSETPGTSESATPESGPGTSTEPSEGSAPTAEAAGCGTAEAAR | |
| Seg 38 | EPTAATTGESAGTAEAAGCGTAEAAGSPAGSPTSTEEGTSESATPESGPGTSTEPS | 230 |
| | EGSAPGSPAGSPTSTEEGTSTEPSEGSAPGTSTEPSEGSAPGTSESATPESGPGSEPA | |
| | TSGSETPGSEPATSGSETPGSPAGSPTSTEEGTSESATPESGPGTSTEPSEGSAPGTS | |
| | TEPSEGSAPGSPAGSPTSTEEGTSTEPSEGSAPGTSTEPSEGSAPGTSESATPESGPG | |
| | TSTEPSEGSAPGTSESATPESGPGSEPATSGSETPGTSTEPSEGSAPGTSTEPSEGSAP | |
| | GTSESATPESGPGTSESATPESGPTAEAAGCGTAEAAGSPAGSPTSTEEGTSESATP | |
| | ESGPGSEPATSGSETPGTSESATPESGPGTSTEPSEGSAPGTSTEPSEGSAPGTSTEPS | |
| | EGSAPGTSTEPSEGSAPGTSTEPSEGSAPGTSTEPSEGSAPGSPAGSPTSTEEGTSTE | |
| | PSEGSAPGTSESATPESGPGSEPATSGSETPGTSESATPESGPGSEPATSGSETPGTS | |
| | ESATPESGPGTSTEPSEGSAPGTSESATPESGPGSPAGSPTSTEEGSPAGSPTSTEEG | |
| | SPAGSPTSTEEGTSESATPESGPGTSTEPSEGSAPTAEAAGCGTAEAAGTSESATPE | |
| | SGPGSEPATSGSETPGTSESATPESGPGSEPATSGSETPGTSESATPESGPGTSTEPSE | |
| | GSAPGSPAGSPTSTEEGTSESATPESGPGSEPATSGSETPGTSESATPESGPGSPAGS | |
| | PTSTEEGSPAGSPTSTEEGTSTEPSEGSAPGTSESATPESGPGTSESATPESGPGTSES | |
| | ATPESGPGSEPATSGSETPGSEPATSGSETPGSPAGSPTSTEEGTSTEPSEGSAPGTS | |
| | TEPSEGSAPGSEPATSGSETPGTSESATPESGPGTSTEPSEGSAPTAEAAGCGTAEA | |
| | AR | |
| Seg 39 | AEATTAAGGAEEEGSPAGSPTSTEEGTSESATPESGPGTSTEPSEGSAPGSPAGSPT | 231 |
| | STEEGTSTEPSEGSAPGTSTEPSEGSAPGTSESATPESGPGSEPATSGSETPGSEPAT | |
| | SGSETPGSPAGSPTSTEEGTSESATPESGPGTSTEPSEGSAPGTSTEPSEGSAPGSPA | |
| | GSPTSTEEGTSTEPSEGSAPGTSTEPSEGSAPGTSESATPESGPGTSTEPSEGSAPGT | |
| | SESATPESGPGSEPATSGSETPGTSTEPSEGSAPGTSTEPSEGSAPGTSESATPESGP | |
| | GTSESATPESGPGSPAGSPTSTEEGTSESATPESGPGSEPATSGSETPGTSESATPES | |
| | GPGTSTEPSEGSAPGTSTEPSEGSAPGTSTEPSEGSAPGTSTEPSEGSAPGTSTEPSE | |
| | GSAPGTSTEPSEGSAPGSPAGSPTSTEEGTSTEPSEGSAPTAEAAGCGTAEAAGTSE | |
| | SATPESGPGSEPATSGSETPGTSESATPESGPGSEPATSGSETPGTSESATPESGPGT | |
| | STEPSEGSAPGTSESATPESGPGSPAGSPTSTEEGSPAGSPTSTEEGSPAGSPTSTEE | |
| | GTSESATPESGPGTSTEPSEGSAPGTSESATPESGPGSEPATSGSETPGTSESATPES | |
| | GPGSEPATSGSETPGTSESATPESGPGTSTEPSEGSAPGSPAGSPTSTEEGTSESATP | |
| | ESGPGSEPATSGSETPGTSESATPESGPGSPAGSPTSTEEGSPAGSPTSTEEGTSTEPS | |
| | EGSAPGTSESATPESGPGTSESATPESGPGTSESATPESGPGSEPATSGSETPGSEPA | |
| | TSGSETPGSPAGSPTSTEEGTSTEPSEGSAPGTSTEPSEGSAPGSEPATSGSETPGTS | |
| | ESATPESGPGTSTEPSEGSAPR | |
| Seg 40 | AEATTAAGGAEEETAEAAGCGTAEAAGSPAGSPTSTEEGTSESATPESGPGTSTEP | 232 |
| | SEGSAPGSPAGSPTSTEEGTSTEPSEGSAPGTSTEPSEGSAPGTSESATPESGPGSEP | |
| | ATSGSETPGSEPATSGSETPGSPAGSPTSTEEGTSESATPESGPGTSTEPSEGSAPGT | |
| | STEPSEGSAPGSPAGSPTSTEEGTSTEPSEGSAPGTSTEPSEGSAPGTSESATPESGP | |
| | GTSTEPSEGSAPGTSESATPESGPGSEPATSGSETPGTSTEPSEGSAPGTSTEPSEGS | |
| | APGTSESATPESGPGTSESATPESGPGSPAGSPTSTEEGTSESATPESGPGSEPATSG | |
| | SETPGTSESATPESGPGTSTEPSEGSAPGTSTEPSEGSAPGTSTEPSEGSAPGTSTEPS | |
| | EGSAPGTSTEPSEGSAPGTSTEPSEGSAPGSPAGSPTSTEEGTSTEPSEGSAPGTSES | |
| | ATPESGPGSEPATSGSETPGTSESATPESGPGSEPATSGSETPGTSESATPESGPGTS | |
| | TEPSEGSAPGTSESATPESGPGSPAGSPTSTEEGSPAGSPTSTEEGSPAGSPTSTEEG | |
| | TSESATPESGPGTSTEPSEGSAPGTSESATPESGPGSEPATSGSETPGTSESATPESGP | |
| | GSEPATSGSETPGTSESATPESGPGTSTEPSEGSAPGSPAGSPTSTEEGTSESATPES | |
| | GPGSEPATSGSETPGTSESATPESGPGSPAGSPTSTEEGSPAGSPTSTEEGTSTEPSE | |
| | GSAPGTSESATPESGPGTSESATPESGPGTSESATPESGPGSEPATSGSETPGSEPAT | |
| | SGSETPGSPAGSPTSTEEGTSTEPSEGSAPGTSTEPSEGSAPGSEPATSGSETPGTSES | |
| | ATPESGPGTSTEPSEGSAPTAEAAGCGTAEAAR | |
| Seg 41 | AEATTAAGGAEEETAEAAGCGTAEAAGSPAGSPTSTEEGTSESATPESGPGTSTEP | 233 |
| | SEGSAPGSPAGSPTSTEEGTSTEPSEGSAPGTSTEPSEGSAPGTSESATPESGPGSEP | |
| | ATSGSETPGSEPATSGSETPGSPAGSPTSTEEGTSESATPESGPGTSTEPSEGSAPGT | |
| | STEPSEGSAPGSPAGSPTSTEEGTSTEPSEGSAPGTSTEPSEGSAPGTSESATPESGP | |
| | GTSTEPSEGSAPGTSESATPESGPGSEPATSGSETPGTSTEPSEGSAPGTSTEPSEGS | |
| | APGTSESATPESGPGTSESATPESGPGSPAGSPTSTEEGTSESATPESGPGSEPATSG | |
| | SETPGTSESATPESGPGTSTEPSEGSAPGTSTEPSEGSAPGTSTEPSEGSAPGTSTEPS | |
| | EGSAPGTSTEPSEGSAPGTSTEPSEGSAPGSPAGSPTSTEEGTSTEPSEGSAPTAEAA | |
| | GCGTAEAAGTSESATPESGPGSEPATSGSETPGTSESATPESGPGSEPATSGSETPG | |
| | TSESATPESGPGTSTEPSEGSAPGTSESATPESGPGSPAGSPTSTEEGSPAGSPTSTEE | |
| | GSPAGSPTSTEEGTSESATPESGPGTSTEPSEGSAPGTSESATPESGPGSEPATSGSE | |
| | TPGTSESATPESGPGSEPATSGSETPGTSESATPESGPGTSTEPSEGSAPGSPAGSPT | |
| | STEEGTSESATPESGPGSEPATSGSETPGTSESATPESGPGSPAGSPTSTEEGSPAGS | |
| | PTSTEEGTSTEPSEGSAPGTSESATPESGPGTSESATPESGPGTSESATPESGPGSEP | |
| | ATSGSETPGSEPATSGSETPGSPAGSPTSTEEGTSTEPSEGSAPGTSTEPSEGSAPGS | |
| | EPATSGSETPGTSESATPESGPGTSTEPSEGSAPTAEAAGCGTAEAAR | |
| Seg 42 | AEATTAAGGAEEETAEAAGCGTAEAAGSPAGSPTSTEEGTSESATPESGPGTSTEP | 234 |
| | SEGSAPGSPAGSPTSTEEGTSTEPSEGSAPGTSTEPSEGSAPGTSESATPESGPGSEP | |
| | ATSGSETPGSEPATSGSETPGSPAGSPTSTEEGTSESATPESGPGTSTEPSEGSAPGT | |
| | STEPSEGSAPGSPAGSPTSTEEGTSTEPSEGSAPGTSTEPSEGSAPGTSESATPESGP | |
| | GTSTEPSEGSAPGTSESATPESGPGSEPATSGSETPGTSTEPSEGSAPGTSTEPSEGS | |
| | APGTSESATPESGPGTSESATPESGPTAEAAGCGTAEAAGSPAGSPTSTEEGTSESA | |
| | TPESGPGSEPATSGSETPGTSESATPESGPGTSTEPSEGSAPGTSTEPSEGSAPGTST | |
| | EPSEGSAPGTSTEPSEGSAPGTSTEPSEGSAPGTSTEPSEGSAPGSPAGSPTSTEEGT | |
| | STEPSEGSAPGTSESATPESGPGSEPATSGSETPGTSESATPESGPGSEPATSGSETP | |
| | GTSESATPESGPGTSTEPSEGSAPGTSESATPESGPGSPAGSPTSTEEGSPAGSPTST | |
| | EEGSPAGSPTSTEEGTSESATPESGPGTSTEPSEGSAPTAEAAGCGTAEAAGTSESA | |
| | TPESGPGSEPATSGSETPGTSESATPESGPGSEPATSGSETPGTSESATPESGPGTST | |
| | EPSEGSAPGSPAGSPTSTEEGTSESATPESGPGSEPATSGSETPGTSESATPESGPGS | |
| | PAGSPTSTEEGSPAGSPTSTEEGTSTEPSEGSAPGTSESATPESGPGTSESATPESGP | |
| | GTSESATPESGPGSEPATSGSETPGSEPATSGSETPGSPAGSPTSTEEGTSTEPSEGS | |
| | APGTSTEPSEGSAPGSEPATSGSETPGTSESATPESGPGTSTEPSEGSAPTAEAAGC | |
| | GTAEAAR | |
| Seg 43 | ATGTATSEGSPEEEEGSPAGSPTSTEEGTSESATPESGPGTSTEPSEGSAPGSPAGSP | 235 |
| | TSTEEGTSTEPSEGSAPGTSTEPSEGSAPGTSESATPESGPGSEPATSGSETPGSEPA | |
| | TSGSETPGSPAGSPTSTEEGTSESATPESGPGTSTEPSEGSAPGTSTEPSEGSAPGSP | |
| | AGSPTSTEEGTSTEPSEGSAPGTSTEPSEGSAPGTSESATPESGPGTSTEPSEGSAPG | |
| | TSESATPESGPGSEPATSGSETPGTSTEPSEGSAPGTSTEPSEGSAPGTSESATPESGP | |
| | GTSESATPESGPGSPAGSPTSTEEGTSESATPESGPGSEPATSGSETPGTSESATPES | |
| | GPGTSTEPSEGSAPGTSTEPSEGSAPGTSTEPSEGSAPGTSTEPSEGSAPGTSTEPSE | |
| | GSAPGTSTEPSEGSAPGSPAGSPTSTEEGTSTEPSEGSAPTAEAAGCGTAEAAGTSE | |
| | SATPESGPGSEPATSGSETPGTSESATPESGPGSEPATSGSETPGTSESATPESGPGT | |
| | STEPSEGSAPGTSESATPESGPGSPAGSPTSTEEGSPAGSPTSTEEGSPAGSPTSTEE | |
| | GTSESATPESGPGTSTEPSEGSAPGTSESATPESGPGSEPATSGSETPGTSESATPES | |
| | GPGSEPATSGSETPGTSESATPESGPGTSTEPSEGSAPGSPAGSPTSTEEGTSESATP | |
| | ESGPGSEPATSGSETPGTSESATPESGPGSPAGSPTSTEEGSPAGSPTSTEEGTSTEPS | |
| | EGSAPGTSESATPESGPGTSESATPESGPGTSESATPESGPGSEPATSGSETPGSEPA | |
| | TSGSETPGSPAGSPTSTEEGTSTEPSEGSAPGTSTEPSEGSAPGSEPATSGSETPGTS | |
| | ESATPESGPGTSTEPSEGSAPR | |
| Seg 44 | ATGTATSEGSPEEEETAEAAGCGTAEAAGSPAGSPTSTEEGTSESATPESGPGTSTE | 236 |
| | PSEGSAPGSPAGSPTSTEEGTSTEPSEGSAPGTSTEPSEGSAPGTSESATPESGPGSE | |
| | PATSGSETPGSEPATSGSETPGSPAGSPTSTEEGTSESATPESGPGTSTEPSEGSAPG | |
| | TSTEPSEGSAPGSPAGSPTSTEEGTSTEPSEGSAPGTSTEPSEGSAPGTSESATPESGP | |
| | GTSTEPSEGSAPGTSESATPESGPGSEPATSGSETPGTSTEPSEGSAPGTSTEPSEGS | |
| | APGTSESATPESGPGTSESATPESGPGSPAGSPTSTEEGTSESATPESGPGSEPATSG | |
| | SETPGTSESATPESGPGTSTEPSEGSAPGTSTEPSEGSAPGTSTEPSEGSAPGTSTEPS | |
| | EGSAPGTSTEPSEGSAPGTSTEPSEGSAPGSPAGSPTSTEEGTSTEPSEGSAPGTSES | |
| | ATPESGPGSEPATSGSETPGTSESATPESGPGSEPATSGSETPGTSESATPESGPGTS | |
| | TEPSEGSAPGTSESATPESGPGSPAGSPTSTEEGSPAGSPTSTEEGSPAGSPTSTEEG | |
| | TSESATPESGPGTSTEPSEGSAPGTSESATPESGPGSEPATSGSETPGTSESATPESGP | |
| | GSEPATSGSETPGTSESATPESGPGTSTEPSEGSAPGSPAGSPTSTEEGTSESATPES | |
| | GPGSEPATSGSETPGTSESATPESGPGSPAGSPTSTEEGSPAGSPTSTEEGTSTEPSE | |
| | GSAPGTSESATPESGPGTSESATPESGPGTSESATPESGPGSEPATSGSETPGSEPAT | |
| | SGSETPGSPAGSPTSTEEGTSTEPSEGSAPGTSTEPSEGSAPGSEPATSGSETPGTSES | |
| | ATPESGPGTSTEPSEGSAPTAEAAGCGTAEAAR | |
| Seg 45 | ATGTATSEGSPEEEETAEAAGCGTAEAAGSPAGSPTSTEEGTSESATPESGPGTSTE | 237 |
| | PSEGSAPGSPAGSPTSTEEGTSTEPSEGSAPGTSTEPSEGSAPGTSESATPESGPGSE | |
| | PATSGSETPGSEPATSGSETPGSPAGSPTSTEEGTSESATPESGPGTSTEPSEGSAPG | |
| | TSTEPSEGSAPGSPAGSPTSTEEGTSTEPSEGSAPGTSTEPSEGSAPGTSESATPESGP | |
| | GTSTEPSEGSAPGTSESATPESGPGSEPATSGSETPGTSTEPSEGSAPGTSTEPSEGS | |
| | APGTSESATPESGPGTSESATPESGPGSPAGSPTSTEEGTSESATPESGPGSEPATSG | |
| | SETPGTSESATPESGPGTSTEPSEGSAPGTSTEPSEGSAPGTSTEPSEGSAPGTSTEPS | |
| | EGSAPGTSTEPSEGSAPGTSTEPSEGSAPGSPAGSPTSTEEGTSTEPSEGSAPTAEAA | |
| | GCGTAEAAGTSESATPESGPGSEPATSGSETPGTSESATPESGPGSEPATSGSETPG | |
| | TSESATPESGPGTSTEPSEGSAPGTSESATPESGPGSPAGSPTSTEEGSPAGSPTSTEE | |
| | GSPAGSPTSTEEGTSESATPESGPGTSTEPSEGSAPGTSESATPESGPGSEPATSGSE | |
| | TPGTSESATPESGPGSEPATSGSETPGTSESATPESGPGTSTEPSEGSAPGSPAGSPT | |
| | STEEGTSESATPESGPGSEPATSGSETPGTSESATPESGPGSPAGSPTSTEEGSPAGS | |
| | PTSTEEGTSTEPSEGSAPGTSESATPESGPGTSESATPESGPGTSESATPESGPGSEP | |
| | ATSGSETPGSEPATSGSETPGSPAGSPTSTEEGTSTEPSEGSAPGTSTEPSEGSAPGS | |
| | EPATSGSETPGTSESATPESGPGTSTEPSEGSAPTAEAAGCGTAEAAR | |
| Seg 46 | ATGTATSEGSPEEEETAEAAGCGTAEAAGSPAGSPTSTEEGTSESATPESGPGTSTE | 238 |
| | PSEGSAPGSPAGSPTSTEEGTSTEPSEGSAPGTSTEPSEGSAPGTSESATPESGPGSE | |
| | PATSGSETPGSEPATSGSETPGSPAGSPTSTEEGTSESATPESGPGTSTEPSEGSAPG | |
| | TSTEPSEGSAPGSPAGSPTSTEEGTSTEPSEGSAPGTSTEPSEGSAPGTSESATPESGP | |
| | GTSTEPSEGSAPGTSESATPESGPGSEPATSGSETPGTSTEPSEGSAPGTSTEPSEGS | |
| | APGTSESATPESGPGTSESATPESGPTAEAAGCGTAEAAGSPAGSPTSTEEGTSESA | |
| | TPESGPGSEPATSGSETPGTSESATPESGPGTSTEPSEGSAPGTSTEPSEGSAPGTST | |
| | EPSEGSAPGTSTEPSEGSAPGTSTEPSEGSAPGTSTEPSEGSAPGSPAGSPTSTEEGT | |
| | STEPSEGSAPGTSESATPESGPGSEPATSGSETPGTSESATPESGPGSEPATSGSETP | |
| | GTSESATPESGPGTSTEPSEGSAPGTSESATPESGPGSPAGSPTSTEEGSPAGSPTST | |
| | EEGSPAGSPTSTEEGTSESATPESGPGTSTEPSEGSAPTAEAAGCGTAEAAGTSESA | |
| | TPESGPGSEPATSGSETPGTSESATPESGPGSEPATSGSETPGTSESATPESGPGTST | |
| | EPSEGSAPGSPAGSPTSTEEGTSESATPESGPGSEPATSGSETPGTSESATPESGPGS | |
| | PAGSPTSTEEGSPAGSPTSTEEGTSTEPSEGSAPGTSESATPESGPGTSESATPESGP | |
| | GTSESATPESGPGSEPATSGSETPGSEPATSGSETPGSPAGSPTSTEEGTSTEPSEGS | |
| | APGTSTEPSEGSAPGSEPATSGSETPGTSESATPESGPGTSTEPSEGSAPTAEAAGC | |
| | GTAEAAR | |
| Seg 47 | AEATTAAGGAEEEGSPAGSPTSTEEGTSESATPESGPGTSTEPSEGSAPGSPAGSPT | 239 |
| | STEEGTSTEPSEGSAPGTSTEPSEGSAPGTSESATPESGPGSEPATSGSETPGSEPAT | |
| | SGSETPGSPAGSPTSTEEGTSESATPESGPGTSTEPSEGSAPGTSTEPSEGSAPGSPA | |
| | GSPTSTEEGTSTEPSEGSAPGTSTEPSEGSAPGTSESATPESGPGTSTEPSEGSAPGT | |
| | SESATPESGPGSEPATSGSETPGTSTEPSEGSAPGTSTEPSEGSAPGTSESATPESGP | |
| | GTSESATPESGPGSPAGSPTSTEEGTSESATPESGPGSEPATSGSETPGTSESATPES | |
| | GPGTSTEPSEGSAPGTSTEPSEGSAPGTSTEPSEGSAPGTSTEPSEGSAPGTSTEPSE | |
| | GSAPGTSTEPSEGSAPGSPAGSPTSTEEGTSTEPSEGSAPTAEAAGCGTAEAAGTSE | |
| | SATPESGPGSEPATSGSETPGTSESATPESGPGSEPATSGSETPGTSESATPESGPGT | |
| | STEPSEGSAPGTSESATPESGPGSPAGSPTSTEEGSPAGSPTSTEEGSPAGSPTSTEE | |
| | GTSESATPESGPGTSTEPSEGSAPGTSESATPESGPGSEPATSGSETPGTSESATPES | |
| | GPGSEPATSGSETPGTSESATPESGPGTSTEPSEGSAPGSPAGSPTSTEEGTSESATP | |
| | ESGPGSEPATSGSETPGTSESATPESGPGSPAGSPTSTEEGSPAGSPTSTEEGTSTEPS | |
| | EGSAPGTSESATPESGPGTSESATPESGPGTSESATPESGPGSEPATSGSETPGSEPA | |
| | TSGSETPGSPAGSPTSTEEGTSTEPSEGSAPGTSTEPSEGSAPGSEPATSGSETPGTS | |
| | ESATPESGPGTSTEPSEGSAPRPRPRPRP | |
| Seg 48 | AEATTAAGGAEEETAEAAGCGTAEAAGSPAGSPTSTEEGTSESATPESGPGTSTEP | 240 |
| | SEGSAPGSPAGSPTSTEEGTSTEPSEGSAPGTSTEPSEGSAPGTSESATPESGPGSEP | |
| | ATSGSETPGSEPATSGSETPGSPAGSPTSTEEGTSESATPESGPGTSTEPSEGSAPGT | |
| | STEPSEGSAPGSPAGSPTSTEEGTSTEPSEGSAPGTSTEPSEGSAPGTSESATPESGP | |
| | GTSTEPSEGSAPGTSESATPESGPGSEPATSGSETPGTSTEPSEGSAPGTSTEPSEGS | |
| | APGTSESATPESGPGTSESATPESGPGSPAGSPTSTEEGTSESATPESGPGSEPATSG | |
| | SETPGTSESATPESGPGTSTEPSEGSAPGTSTEPSEGSAPGTSTEPSEGSAPGTSTEPS | |
| | EGSAPGTSTEPSEGSAPGTSTEPSEGSAPGSPAGSPTSTEEGTSTEPSEGSAPGTSES | |
| | ATPESGPGSEPATSGSETPGTSESATPESGPGSEPATSGSETPGTSESATPESGPGTS | |
| | TEPSEGSAPGTSESATPESGPGSPAGSPTSTEEGSPAGSPTSTEEGSPAGSPTSTEEG | |
| | TSESATPESGPGTSTEPSEGSAPGTSESATPESGPGSEPATSGSETPGTSESATPESGP | |
| | GSEPATSGSETPGTSESATPESGPGTSTEPSEGSAPGSPAGSPTSTEEGTSESATPES | |
| | GPGSEPATSGSETPGTSESATPESGPGSPAGSPTSTEEGSPAGSPTSTEEGTSTEPSE | |
| | GSAPGTSESATPESGPGTSESATPESGPGTSESATPESGPGSEPATSGSETPGSEPAT | |
| | SGSETPGSPAGSPTSTEEGTSTEPSEGSAPGTSTEPSEGSAPGSEPATSGSETPGTSES | |
| | ATPESGPGTSTEPSEGSAPTAEAAGCGTAEAARPRPRPRP | |
| Seg 49 | AEATTAAGGAEEETAEAAGCGTAEAAGSPAGSPTSTEEGTSESATPESGPGTSTEP | 241 |
| | SEGSAPGSPAGSPTSTEEGTSTEPSEGSAPGTSTEPSEGSAPGTSESATPESGPGSEP | |
| | ATSGSETPGSEPATSGSETPGSPAGSPTSTEEGTSESATPESGPGTSTEPSEGSAPGT | |
| | STEPSEGSAPGSPAGSPTSTEEGTSTEPSEGSAPGTSTEPSEGSAPGTSESATPESGP | |
| | GTSTEPSEGSAPGTSESATPESGPGSEPATSGSETPGTSTEPSEGSAPGTSTEPSEGS | |
| | APGTSESATPESGPGTSESATPESGPGSPAGSPTSTEEGTSESATPESGPGSEPATSG | |
| | SETPGTSESATPESGPGTSTEPSEGSAPGTSTEPSEGSAPGTSTEPSEGSAPGTSTEPS | |
| | EGSAPGTSTEPSEGSAPGTSTEPSEGSAPGSPAGSPTSTEEGTSTEPSEGSAPTAEAA | |
| | GCGTAEAAGTSESATPESGPGSEPATSGSETPGTSESATPESGPGSEPATSGSETPG | |
| | TSESATPESGPGTSTEPSEGSAPGTSESATPESGPGSPAGSPTSTEEGSPAGSPTSTEE | |
| | GSPAGSPTSTEEGTSESATPESGPGTSTEPSEGSAPGTSESATPESGPGSEPATSGSE | |
| | TPGTSESATPESGPGSEPATSGSETPGTSESATPESGPGTSTEPSEGSAPGSPAGSPT | |
| | STEEGTSESATPESGPGSEPATSGSETPGTSESATPESGPGSPAGSPTSTEEGSPAGS | |
| | PTSTEEGTSTEPSEGSAPGTSESATPESGPGTSESATPESGPGTSESATPESGPGSEP | |
| | ATSGSETPGSEPATSGSETPGSPAGSPTSTEEGTSTEPSEGSAPGTSTEPSEGSAPGS | |
| | EPATSGSETPGTSESATPESGPGTSTEPSEGSAPTAEAAGCGTAEAARPRPRPRP | |
| Seg 50 | AEATTAAGGAEEETAEAAGCGTAEAAGSPAGSPTSTEEGTSESATPESGPGTSTEP | 242 |
| | SEGSAPGSPAGSPTSTEEGTSTEPSEGSAPGTSTEPSEGSAPGTSESATPESGPGSEP | |
| | ATSGSETPGSEPATSGSETPGSPAGSPTSTEEGTSESATPESGPGTSTEPSEGSAPGT | |
| | STEPSEGSAPGSPAGSPTSTEEGTSTEPSEGSAPGTSTEPSEGSAPGTSESATPESGP | |
| | GTSTEPSEGSAPGTSESATPESGPGSEPATSGSETPGTSTEPSEGSAPGTSTEPSEGS | |
| | APGTSESATPESGPGTSESATPESGPTAEAAGCGTAEAAGSPAGSPTSTEEGTSESA | |
| | TPESGPGSEPATSGSETPGTSESATPESGPGTSTEPSEGSAPGTSTEPSEGSAPGTST | |
| | EPSEGSAPGTSTEPSEGSAPGTSTEPSEGSAPGTSTEPSEGSAPGSPAGSPTSTEEGT | |
| | STEPSEGSAPGTSESATPESGPGSEPATSGSETPGTSESATPESGPGSEPATSGSETP | |
| | GTSESATPESGPGTSTEPSEGSAPGTSESATPESGPGSPAGSPTSTEEGSPAGSPTST | |
| | EEGSPAGSPTSTEEGTSESATPESGPGTSTEPSEGSAPTAEAAGCGTAEAAGTSESA | |
| | TPESGPGSEPATSGSETPGTSESATPESGPGSEPATSGSETPGTSESATPESGPGTST | |
| | EPSEGSAPGSPAGSPTSTEEGTSESATPESGPGSEPATSGSETPGTSESATPESGPGS | |
| | PAGSPTSTEEGSPAGSPTSTEEGTSTEPSEGSAPGTSESATPESGPGTSESATPESGP | |
| | GTSESATPESGPGSEPATSGSETPGSEPATSGSETPGSPAGSPTSTEEGTSTEPSEGS | |
| | APGTSTEPSEGSAPGSEPATSGSETPGTSESATPESGPGTSTEPSEGSAPTAEAAGC | |
| | GTAEAARPRPRPRP | |
| Seg 51 | AEATTAAGGAEEEGSPAGSPTSTEEGTSESATPESGPGTSTEPSEGSAPGSPAGSPT | 243 |
| | STEEGTSTEPSEGSAPGTSTEPSEGSAPGTSESATPESGPGSEPATSGSETPGSEPAT | |
| | SGSETPGSPAGSPTSTEEGTSESATPESGPGTSTEPSEGSAPGTSTEPSEGSAPGSPA | |
| | GSPTSTEEGTSTEPSEGSAPGTSTEPSEGSAPGTSESATPESGPGTSTEPSEGSAPGT | |
| | SESATPESGPGSEPATSGSETPGTSTEPSEGSAPGTSTEPSEGSAPGTSESATPESGP | |
| | GTSESATPESGPGSPAGSPTSTEEGTSESATPESGPGSEPATSGSETPGTSESATPES | |
| | GPGTSTEPSEGSAPGTSTEPSEGSAPGTSTEPSEGSAPGTSTEPSEGSAPGTSTEPSE | |
| | GSAPGTSTEPSEGSAPGSPAGSPTSTEEGTSTEPSEGSAPTAEAAGCGTAEAAGTSE | |
| | SATPESGPGSEPATSGSETPGTSESATPESGPGSEPATSGSETPGTSESATPESGPGT | |
| | STEPSEGSAPGTSESATPESGPGSPAGSPTSTEEGSPAGSPTSTEEGSPAGSPTSTEE | |
| | GTSESATPESGPGTSTEPSEGSAPGTSESATPESGPGSEPATSGSETPGTSESATPES | |
| | GPGSEPATSGSETPGTSESATPESGPGTSTEPSEGSAPGSPAGSPTSTEEGTSESATP | |
| | ESGPGSEPATSGSETPGTSESATPESGPGSPAGSPTSTEEGSPAGSPTSTEEGTSTEPS | |
| | EGSAPGTSESATPESGPGTSESATPESGPGTSESATPESGPGSEPATSGSETPGSEPA | |
| | TSGSETPGSPAGSPTSTEEGTSTEPSEGSAPGTSTEPSEGSAPGSEPATSGSETPGTS | |
| | ESATPESGPGTSTEPSEGSAPR | |
| Seg 52 | AEATTAAGGAEEETAEAAGCGTAEAAGSPAGSPTSTEEGTSESATPESGPGTSTEP | 244 |
| | SEGSAPGSPAGSPTSTEEGTSTEPSEGSAPGTSTEPSEGSAPGTSESATPESGPGSEP | |
| | ATSGSETPGSEPATSGSETPGSPAGSPTSTEEGTSESATPESGPGTSTEPSEGSAPGT | |
| | STEPSEGSAPGSPAGSPTSTEEGTSTEPSEGSAPGTSTEPSEGSAPGTSESATPESGP | |
| | GTSTEPSEGSAPGTSESATPESGPGSEPATSGSETPGTSTEPSEGSAPGTSTEPSEGS | |
| | APGTSESATPESGPGTSESATPESGPGSPAGSPTSTEEGTSESATPESGPGSEPATSG | |
| | SETPGTSESATPESGPGTSTEPSEGSAPGTSTEPSEGSAPGTSTEPSEGSAPGTSTEPS | |
| | EGSAPGTSTEPSEGSAPGTSTEPSEGSAPGSPAGSPTSTEEGTSTEPSEGSAPGTSES | |
| | ATPESGPGSEPATSGSETPGTSESATPESGPGSEPATSGSETPGTSESATPESGPGTS | |
| | TEPSEGSAPGTSESATPESGPGSPAGSPTSTEEGSPAGSPTSTEEGSPAGSPTSTEEG | |
| | TSESATPESGPGTSTEPSEGSAPGTSESATPESGPGSEPATSGSETPGTSESATPESGP | |
| | GSEPATSGSETPGTSESATPESGPGTSTEPSEGSAPGSPAGSPTSTEEGTSESATPES | |
| | GPGSEPATSGSETPGTSESATPESGPGSPAGSPTSTEEGSPAGSPTSTEEGTSTEPSE | |
| | GSAPGTSESATPESGPGTSESATPESGPGTSESATPESGPGSEPATSGSETPGSEPAT | |
| | SGSETPGSPAGSPTSTEEGTSTEPSEGSAPGTSTEPSEGSAPGSEPATSGSETPGTSES | |
| | ATPESGPGTSTEPSEGSAPTAEAAGCGTAEAAR | |
| Seg 53 | AEATTAAGGAEEETAEAAGCGTAEAAGSPAGSPTSTEEGTSESATPESGPGTSTEP | 245 |
| | SEGSAPGSPAGSPTSTEEGTSTEPSEGSAPGTSTEPSEGSAPGTSESATPESGPGSEP | |
| | ATSGSETPGSEPATSGSETPGSPAGSPTSTEEGTSESATPESGPGTSTEPSEGSAPGT | |
| | STEPSEGSAPGSPAGSPTSTEEGTSTEPSEGSAPGTSTEPSEGSAPGTSESATPESGP | |
| | GTSTEPSEGSAPGTSESATPESGPGSEPATSGSETPGTSTEPSEGSAPGTSTEPSEGS | |
| | APGTSESATPESGPGTSESATPESGPGSPAGSPTSTEEGTSESATPESGPGSEPATSG | |
| | SETPGTSESATPESGPGTSTEPSEGSAPGTSTEPSEGSAPGTSTEPSEGSAPGTSTEPS | |
| | EGSAPGTSTEPSEGSAPGTSTEPSEGSAPGSPAGSPTSTEEGTSTEPSEGSAPTAEAA | |
| | GCGTAEAAGTSESATPESGPGSEPATSGSETPGTSESATPESGPGSEPATSGSETPG | |
| | TSESATPESGPGTSTEPSEGSAPGTSESATPESGPGSPAGSPTSTEEGSPAGSPTSTEE | |
| | GSPAGSPTSTEEGTSESATPESGPGTSTEPSEGSAPGTSESATPESGPGSEPATSGSE | |
| | TPGTSESATPESGPGSEPATSGSETPGTSESATPESGPGTSTEPSEGSAPGSPAGSPT | |
| | STEEGTSESATPESGPGSEPATSGSETPGTSESATPESGPGSPAGSPTSTEEGSPAGS | |
| | PTSTEEGTSTEPSEGSAPGTSESATPESGPGTSESATPESGPGTSESATPESGPGSEP | |
| | ATSGSETPGSEPATSGSETPGSPAGSPTSTEEGTSTEPSEGSAPGTSTEPSEGSAPGS | |
| | EPATSGSETPGTSESATPESGPGTSTEPSEGSAPTAEAAGCGTAEAAR | |
| Seg 54 | AEATTAAGGAEEETAEAAGCGTAEAAGSPAGSPTSTEEGTSESATPESGPGTSTEP | 246 |
| | SEGSAPGSPAGSPTSTEEGTSTEPSEGSAPGTSTEPSEGSAPGTSESATPESGPGSEP | |
| | ATSGSETPGSEPATSGSETPGSPAGSPTSTEEGTSESATPESGPGTSTEPSEGSAPGT | |
| | STEPSEGSAPGSPAGSPTSTEEGTSTEPSEGSAPGTSTEPSEGSAPGTSESATPESGP | |
| | GTSTEPSEGSAPGTSESATPESGPGSEPATSGSETPGTSTEPSEGSAPGTSTEPSEGS | |
| | APGTSESATPESGPGTSESATPESGPTAEAAGCGTAEAAGSPAGSPTSTEEGTSESA | |
| | TPESGPGSEPATSGSETPGTSESATPESGPGTSTEPSEGSAPGTSTEPSEGSAPGTST | |
| | EPSEGSAPGTSTEPSEGSAPGTSTEPSEGSAPGTSTEPSEGSAPGSPAGSPTSTEEGT | |
| | STEPSEGSAPGTSESATPESGPGSEPATSGSETPGTSESATPESGPGSEPATSGSETP | |
| | GTSESATPESGPGTSTEPSEGSAPGTSESATPESGPGSPAGSPTSTEEGSPAGSPTST | |
| | EEGSPAGSPTSTEEGTSESATPESGPGTSTEPSEGSAPTAEAAGCGTAEAAGTSESA | |
| | TPESGPGSEPATSGSETPGTSESATPESGPGSEPATSGSETPGTSESATPESGPGTST | |
| | EPSEGSAPGSPAGSPTSTEEGTSESATPESGPGSEPATSGSETPGTSESATPESGPGS | |
| | PAGSPTSTEEGSPAGSPTSTEEGTSTEPSEGSAPGTSESATPESGPGTSESATPESGP | |
| | GTSESATPESGPGSEPATSGSETPGSEPATSGSETPGSPAGSPTSTEEGTSTEPSEGS | |
| | APGTSTEPSEGSAPGSEPATSGSETPGTSESATPESGPGTSTEPSEGSAPTAEAAGC | |
| | GTAEAAR | |
| Seg 55 | AEATTAAGGAEEETAEAAGCGTAEAAGSPAGSPTSTEEGTSESATPESGPGTSTEP | 247 |
| | SEGSAPGSPAGSPTSTEEGTSTEPSEGSAPGTSTEPSEGSAPGTSESATPESGPGSEP | |
| | ATSGSETPGSEPATSGSETPGSPAGSPTSTEEGTSESATPESGPGTSTEPSEGSAPGT | |
| | STEPSEGSAPGSPAGSPTSTEEGTSTEPSEGSAPGTSTEPSEGSAPGTSESATPESGP | |
| | GTSTEPSEGSAPGTSESATPESGPGSEPATSGSETPGTSTEPSEGSAPGTSTEPSEGS | |
| | APGTSESATPESGPGTSESATPESGPGGKPGGSPAGSPTSTEEGTSESATPESGPGSE | |
| | PATSGSETPGTSESATPESGPGTSTEPSEGSAPGTSTEPSEGSAPGTSTEPSEGSAPG | |
| | TSTEPSEGSAPGTSTEPSEGSAPGTSTEPSEGSAPGSPAGSPTSTEEGTSTEPSEGSAP | |
| | GTSESATPESGPGSEPATSGSETPGTSESATPESGPGSEPATSGSETPGTSESATPES | |
| | GPGTSTEPSEGSAPGTSESATPESGPGSPAGSPTSTEEGSPAGSPTSTEEGSPAGSPT | |
| | STEEGTSESATPESGPGTSTEPSEGSAPTAEAAGCGTAEAAGTSESATPESGPGSEP | |
| | ATSGSETPGTSESATPESGPGSEPATSGSETPGTSESATPESGPGTSTEPSEGSAPGS | |
| | PAGSPTSTEEGTSESATPESGPGSEPATSGSETPGTSESATPESGPGSPAGSPTSTEE | |
| | GSPAGSPTSTEEGTSTEPSEGSAPGTSESATPESGPGTSESATPESGPGTSESATPES | |
| | GPGSEPATSGSETPGSEPATSGSETPGSPAGSPTSTEEGTSTEPSEGSAPGTSTEPSE | |
| | GSAPGSEPATSGSETPGTSESATPESGPGTSTEPSEGSAPGGKPGR | |
| Seg 56 | AEATTAAGGAEEETAEAAGCGTAEAAGSPAGSPTSTEEGTSESATPESGPGTSTEP | 248 |
| | SEGSAPGSPAGSPTSTEEGTSTEPSEGSAPGTSTEPSEGSAPGTSESATPESGPGSEP | |
| | ATSGSETPGSEPATSGSETPGSPAGSPTSTEEGTSESATPESGPGTSTEPSEGSAPGT | |
| | STEPSEGSAPGSPAGSPTSTEEGTSTEPSEGSAPGTSTEPSEGSAPGTSESATPESGP | |
| | GTSTEPSEGSAPGTSESATPESGPGSEPATSGSETPGTSTEPSEGSAPGTSTEPSEGS | |
| | APGTSESATPESGPGTSESATPESGPTAEAAGCGTAEAAGSPAGSPTSTEEGTSESA | |
| | TPESGPGSEPATSGSETPGTSESATPESGPGTSTEPSEGSAPGTSTEPSEGSAPGTST | |
| | EPSEGSAPGTSTEPSEGSAPGTSTEPSEGSAPGTSTEPSEGSAPGSPAGSPTSTEEGT | |
| | STEPSEGSAPGTSESATPESGPGSEPATSGSETPGTSESATPESGPGSEPATSGSETP | |
| | GTSESATPESGPGTSTEPSEGSAPGTSESATPESGPGSPAGSPTSTEEGSPAGSPTST | |
| | EEGSPAGSPTSTEEGTSESATPESGPGTSTEPSEGSAPTAEAAGCGTAEAAGTSESA | |
| | TPESGPGSEPATSGSETPGTSESATPESGPGSEPATSGSETPGTSESATPESGPGTST | |
| | EPSEGSAPGSPAGSPTSTEEGTSESATPESGPGSEPATSGSETPGTSESATPESGPGS | |
| | PAGSPTSTEEGSPAGSPTSTEEGTSTEPSEGSAPGTSESATPESGPGTSESATPESGP | |
| | GTSESATPESGPGSEPATSGSETPGSEPATSGSETPGSPAGSPTSTEEGTSTEPSEGS | |
| | APGTSTEPSEGSAPGSEPATSGSETPGTSESATPESGPGTSTEPSEGSAPGGKPGR | |
| Seg 57 | AEATTAAGGAEEEGGKPGGSPAGSPTSTEEGTSESATPESGPGTSTEPSEGSAPGSP | 249 |
| | AGSPTSTEEGTSTEPSEGSAPGTSTEPSEGSAPGTSESATPESGPGSEPATSGSETPG | |
| | SEPATSGSETPGSPAGSPTSTEEGTSESATPESGPGTSTEPSEGSAPGTSTEPSEGSAP | |
| | GSPAGSPTSTEEGTSTEPSEGSAPGTSTEPSEGSAPGTSESATPESGPGTSTEPSEGS | |
| | APGTSESATPESGPGSEPATSGSETPGTSTEPSEGSAPGTSTEPSEGSAPGTSESATP | |
| | ESGPGTSESATPESGPGGKPGGSPAGSPTSTEEGTSESATPESGPGSEPATSGSETPG | |
| | TSESATPESGPGTSTEPSEGSAPGTSTEPSEGSAPGTSTEPSEGSAPGTSTEPSEGSAP | |
| | GTSTEPSEGSAPGTSTEPSEGSAPGSPAGSPTSTEEGTSTEPSEGSAPGTSESATPES | |
| | GPGSEPATSGSETPGTSESATPESGPGSEPATSGSETPGTSESATPESGPGTSTEPSE | |
| | GSAPGTSESATPESGPGSPAGSPTSTEEGSPAGSPTSTEEGSPAGSPTSTEEGTSESA | |
| | TPESGPGTSTEPSEGSAPGGKPGGTSESATPESGPGSEPATSGSETPGTSESATPESG | |
| | PGSEPATSGSETPGTSESATPESGPGTSTEPSEGSAPGSPAGSPTSTEEGTSESATPES | |
| | GPGSEPATSGSETPGTSESATPESGPGSPAGSPTSTEEGSPAGSPTSTEEGTSTEPSE | |
| | GSAPGTSESATPESGPGTSESATPESGPGTSESATPESGPGSEPATSGSETPGSEPAT | |
| | SGSETPGSPAGSPTSTEEGTSTEPSEGSAPGTSTEPSEGSAPGSEPATSGSETPGTSES | |
| | ATPESGPGTSTEPSEGSAPTAEAAGCGTAEAAR | |
| Seg 58 | AEATTAAGGAEEETAEAAGCGTAEAAGSPAGSPTSTEEGTSESATPESGPGTSTEP | 250 |
| | SEGSAPGSPAGSPTSTEEGTSTEPSEGSAPGTSTEPSEGSAPGTSESATPESGPGSEP | |
| | ATSGSETPGSEPATSGSETPGSPAGSPTSTEEGTSESATPESGPGTSTEPSEGSAPGT | |
| | STEPSEGSAPGSPAGSPTSTEEGTSTEPSEGSAPGTSTEPSEGSAPGTSESATPESGP | |
| | GTSTEPSEGSAPGTSESATPESGPGSEPATSGSETPGTSTEPSEGSAPGTSTEPSEGS | |
| | APGTSESATPESGPGTSESATPESGPGGKPGGSPAGSPTSTEEGTSESATPESGPGSE | |
| | PATSGSETPGTSESATPESGPGTSTEPSEGSAPGTSTEPSEGSAPGTSTEPSEGSAPG | |
| | TSTEPSEGSAPGTSTEPSEGSAPGTSTEPSEGSAPGSPAGSPTSTEEGTSTEPSEGSAP | |
| | GTSESATPESGPGSEPATSGSETPGTSESATPESGPGSEPATSGSETPGTSESATPES | |
| | GPGTSTEPSEGSAPGTSESATPESGPGSPAGSPTSTEEGSPAGSPTSTEEGSPAGSPT | |
| | STEEGTSESATPESGPGTSTEPSEGSAPTAEAAGCGTAEAAGTSESATPESGPGSEP | |
| | ATSGSETPGTSESATPESGPGSEPATSGSETPGTSESATPESGPGTSTEPSEGSAPGS | |
| | PAGSPTSTEEGTSESATPESGPGSEPATSGSETPGTSESATPESGPGSPAGSPTSTEE | |
| | GSPAGSPTSTEEGTSTEPSEGSAPGTSESATPESGPGTSESATPESGPGTSESATPES | |
| | GPGSEPATSGSETPGSEPATSGSETPGSPAGSPTSTEEGTSTEPSEGSAPGTSTEPSE | |
| | GSAPGSEPATSGSETPGTSESATPESGPGTSTEPSEGSAPGGKPGR | |
| Seg 59 | AEATTAAGGAEEEGSPAGSPTSTEEGTSESATPESGPGTSTEPSEGSAPGSPAGSPT | 251 |
| | STEEGTSTEPSEGSAPGTSTEPSEGSAPGTSESATPESGPGSEPATSGSETPGSEPAT | |
| | SGSETPGSPAGSPTSTEEGTSESATPESGPGTSTEPSEGSAPGTSTEPSEGSAPGSPA | |
| | GSPTSTEEGTSTEPSEGSAPGTSTEPSEGSAPGTSESATPESGPGTSTEPSEGSAPGT | |
| | SESATPESGPGSEPATSGSETPGTSTEPSEGSAPGTSTEPSEGSAPGTSESATPESGP | |
| | GTSESATPESGPGSPAGSPTSTEEGTSESATPESGPGSEPATSGSETPGTSESATPES | |
| | GPGTSTEPSEGSAPGTSTEPSEGSAPGTSTEPSEGSAPGTSTEPSEGSAPGTSTEPSE | |
| | GSAPGTSTEPSEGSAPGSPAGSPTSTEEGTSTEPSEGSAPGTSESATPESGPGSEPAT | |
| | SGSETPGTSESATPESGPGSEPATSGSETPGTSESATPESGPGTSTEPSEGSAPGTSES | |
| | ATPESGPGSPAGSPTSTEEGSPAGSPTSTEEGSPAGSPTSTEEGTSESATPESGPGTS | |
| | TEPSEGSAPTAEAAGCGTAEAAR | |
| Seg 60 | AEATTAAGGAEEEGSPAGSPTSTEEGTSESATPESGPGTSTEPSEGSAPGSPAGSPT | 252 |
| | STEEGTSTEPSEGSAPGTSTEPSEGSAPGTSESATPESGPGSEPATSGSETPGSEPAT | |
| | SGSETPGSPAGSPTSTEEGTSESATPESGPGTSTEPSEGSAPGTSTEPSEGSAPGSPA | |
| | GSPTSTEEGTSTEPSEGSAPGTSTEPSEGSAPGTSESATPESGPGTSTEPSEGSAPGT | |
| | SESATPESGPGSEPATSGSETPGTSTEPSEGSAPGTSTEPSEGSAPGTSESATPESGP | |
| | GTSESATPESGPGSPAGSPTSTEEGTSESATPESGPGSEPATSGSETPGTSESATPES | |
| | GPGTSTEPSEGSAPGTSTEPSEGSAPGTSTEPSEGSAPGTSTEPSEGSAPGTSTEPSE | |
| | GSAPGTSTEPSEGSAPGSPAGSPTSTEEGTSTEPSEGSAPTAEAAGCGTAEAAR | |
| Seg 61 | AEATTAAGGAEEEGSPAGSPTSTEEGTSESATPESGPGTSTEPSEGSAPGSPAGSPT | 253 |
| | STEEGTSTEPSEGSAPGTSTEPSEGSAPGTSESATPESGPGSEPATSGSETPGSEPAT | |
| | SGSETPGSPAGSPTSTEEGTSESATPESGPGTSTEPSEGSAPGTSTEPSEGSAPGSPA | |
| | GSPTSTEEGTSTEPSEGSAPGTSTEPSEGSAPGTSESATPESGPGTSTEPSEGSAPGT | |
| | SESATPESGPGSEPATSGSETPGTSTEPSEGSAPGTSTEPSEGSAPGTSESATPESGP | |
| | GTSESATPESGPTAEAAGCGTAEAAR | |
| Seg 62 | AEATTAAGGAEEEGSPAGSPTSTEEGTSESATPESGPGTSTEPSEGSAPGSPAGSPT | 254 |
| | STEEGTSTEPSEGSAPGTSTEPSEGSAPGTSESATPESGPGSEPATSGSETPGSEPAT | |
| | SGSETPGSPAGSPTSTEEGTSESATPESGPGTSTEPSEGSAPTAEAAGCGTAEAAR | |
| Seg 63 | AEATTAAGGAEEEGSPAGSPTSTEEGTSESATPESGPGTSTEPSEGSAPGSPAGSPT | 255 |
| | STEEGTSTEPSEGSAPGTSTEPSEGSAPGTSESATPESGPGSEPATSGSETPGSEPAT | |
| | SGSETPGSPAGSPTSTEEGTSESATPESGPGTSTEPSEGSAPGTSTEPSEGSAPGSPA | |
| | GSPTSTEEGTSTEPSEGSAPGTSTEPSEGSAPGTSESATPESGPGTSTEPSEGSAPGT | |
| | SESATPESGPGSEPATSGSETPGTSTEPSEGSAPGTSTEPSEGSAPGTSESATPESGP | |
| | GTSESATPESGPGSPAGSPTSTEEGTSESATPESGPGSEPATSGSETPGTSESATPES | |
| | GPGTSTEPSEGSAPGTSTEPSEGSAPGTSTEPSEGSAPGTSTEPSEGSAPGTSTEPSE | |
| | GSAPGTSTEPSEGSAPGSPAGSPTSTEEGTSTEPSEGSAPGTSESATPESGPGSEPAT | |
| | SGSETPGTSESATPESGPGSEPATSGSETPGTSESATPESGPGTSTEPSEGSAPGTSES | |
| | ATPESGPGSPAGSPTSTEEGSPAGSPTSTEEGSPAGSPTSTEEGTSESATPESGPGTS | |
| | TEPSEGSAPTAEAAGCGTAEAAR | |
| Seg 64 | AEATTAAGGAEEEGSPAGSPTSTEEGTSESATPESGPGTSTEPSEGSAPGSPAGSPT | 256 |
| | STEEGTSTEPSEGSAPGTSTEPSEGSAPGTSESATPESGPGSEPATSGSETPGSEPAT | |
| | SGSETPGSPAGSPTSTEEGTSESATPESGPGTSTEPSEGSAPGTSTEPSEGSAPGSPA | |
| | GSPTSTEEGTSTEPSEGSAPGTSTEPSEGSAPGTSESATPESGPGTSTEPSEGSAPGT | |
| | SESATPESGPGSEPATSGSETPGTSTEPSEGSAPGTSTEPSEGSAPGTSESATPESGP | |
| | GTSESATPESGPGSPAGSPTSTEEGTSESATPESGPGSEPATSGSETPGTSESATPES | |
| | GPGTSTEPSEGSAPGTSTEPSEGSAPGTSTEPSEGSAPGTSTEPSEGSAPGTSTEPSE | |
| | GSAPGTSTEPSEGSAPGSPAGSPTSTEEGTSTEPSEGSAPTAEAAGCGTAEAAR | |
| Seg 65 | AEATTAAGGAEEEGSPAGSPTSTEEGTSESATPESGPGTSTEPSEGSAPGSPAGSPT | 257 |
| | STEEGTSTEPSEGSAPGTSTEPSEGSAPGTSESATPESGPGSEPATSGSETPGSEPAT | |
| | SGSETPGSPAGSPTSTEEGTSESATPESGPGTSTEPSEGSAPGTSTEPSEGSAPGSPA | |
| | GSPTSTEEGTSTEPSEGSAPGTSTEPSEGSAPGTSESATPESGPGTSTEPSEGSAPGT | |
| | SESATPESGPGSEPATSGSETPGTSTEPSEGSAPGTSTEPSEGSAPGTSESATPESGP | |
| | GTSESATPESGPTAEAAGCGTAEAAR | |
| Seg 66 | AEATTAAGGAEEEGSPAGSPTSTEEGTSESATPESGPGTSTEPSEGSAPGSPAGSPT | 258 |
| | STEEGTSTEPSEGSAPGTSTEPSEGSAPGTSESATPESGPGSEPATSGSETPGSEPAT | |
| | SGSETPGSPAGSPTSTEEGTSESATPESGPGTSTEPSEGSAPTAEAAGCGTAEAAR | |
| Seg 67 | AEATTAAGGAEEEGSPAGSPTSTEEGTSESATPESGPGTSTEPSEGSAPGSPAGSPT | 259 |
| | STEEGTSTEPSEGSAPGTSTEPSEGSAPGTSESATPESGPGSEPATSGSETPGSEPAT | |
| | SGSETPGSPAGSPTSTEEGTSESATPESGPGTSTEPSEGSAPGTSTEPSEGSAPGSPA | |
| | GSPTSTEEGTSTEPSEGSAPGTSTEPSEGSAPGTSESATPESGPGTSTEPSEGSAPGT | |
| | SESATPESGPGSEPATSGSETPGTSTEPSEGSAPGTSTEPSEGSAPGTSESATPESGP | |
| | GTSESATPESGPGSPAGSPTSTEEGTSESATPESGPGSEPATSGSETPGTSESATPES | |
| | GPGTSTEPSEGSAPGTSTEPSEGSAPGTSTEPSEGSAPGTSTEPSEGSAPGTSTEPSE | |
| | GSAPGTSTEPSEGSAPGSPAGSPTSTEEGTSTEPSEGSAPGTSESATPESGPGSEPAT | |
| | SGSETPGTSESATPESGPGSEPATSGSETPGTSESATPESGPGTSTEPSEGSAPGTSES | |
| | ATPESGPGSPAGSPTSTEEGSPAGSPTSTEEGSPAGSPTSTEEGTSESATPESGPGTS | |
| | TEPSEGSAPGGKPGR | |
| Seg 68 | AEATTAAGGAEEEGSPAGSPTSTEEGTSESATPESGPGTSTEPSEGSAPGSPAGSPT | 260 |
| | STEEGTSTEPSEGSAPGTSTEPSEGSAPGTSESATPESGPGSEPATSGSETPGSEPAT | |
| | SGSETPGSPAGSPTSTEEGTSESATPESGPGTSTEPSEGSAPGTSTEPSEGSAPGSPA | |
| | GSPTSTEEGTSTEPSEGSAPGTSTEPSEGSAPGTSESATPESGPGTSTEPSEGSAPGT | |
| | SESATPESGPGSEPATSGSETPGTSTEPSEGSAPGTSTEPSEGSAPGTSESATPESGP | |
| | GTSESATPESGPGSPAGSPTSTEEGTSESATPESGPGSEPATSGSETPGTSESATPES | |
| | GPGTSTEPSEGSAPGTSTEPSEGSAPGTSTEPSEGSAPGTSTEPSEGSAPGTSTEPSE | |
| | GSAPGTSTEPSEGSAPGSPAGSPTSTEEGTSTEPSEGSAPGGKPGR | |
| Seg 69 | AEATTAAGGAEEEGSPAGSPTSTEEGTSESATPESGPGTSTEPSEGSAPGSPAGSPT | 261 |
| | STEEGTSTEPSEGSAPGTSTEPSEGSAPGTSESATPESGPGSEPATSGSETPGSEPAT | |
| | SGSETPGSPAGSPTSTEEGTSESATPESGPGTSTEPSEGSAPGTSTEPSEGSAPGSPA | |
| | GSPTSTEEGTSTEPSEGSAPGTSTEPSEGSAPGTSESATPESGPGTSTEPSEGSAPGT | |
| | SESATPESGPGSEPATSGSETPGTSTEPSEGSAPGTSTEPSEGSAPGTSESATPESGP | |
| | GTSESATPESGPGGKPGR | |
| Seg 70 | AEATTAAGGAEEEGSPAGSPTSTEEGTSESATPESGPGTSTEPSEGSAPGSPAGSPT | 262 |
| | STEEGTSTEPSEGSAPGTSTEPSEGSAPGTSESATPESGPGSEPATSGSETPGSEPAT | |
| | SGSETPGSPAGSPTSTEEGTSESATPESGPGTSTEPSEGSAPGGKPGR | |
| Seg 71 | AEATTAAGGAEEEGSPAGSPTSTEEGTSESATPESGPGTSTEPSEGSAPGSPAGSPT | 263 |
| | STEEGTSTEPSEGSAPGTSTEPSEGSAPGTSESATPESGPGSEPATSGSETPGSEPAT | |
| | SGSETPGSPAGSPTSTEEGTSESATPESGPGTSTEPSEGSAPGTSTEPSEGSAPGSPA | |
| | GSPTSTEEGTSTEPSEGSAPGTSTEPSEGSAPGTSESATPESGPGTSTEPSEGSAPGT | |
| | SESATPESGPGSEPATSGSETPGTSTEPSEGSAPGTSTEPSEGSAPGTSESATPESGP | |
| | GTSESATPESGPGSPAGSPTSTEEGTSESATPESGPGSEPATSGSETPGTSESATPES | |
| | GPGTSTEPSEGSAPGTSTEPSEGSAPGTSTEPSEGSAPGTSTEPSEGSAPGTSTEPSE | |
| | GSAPGTSTEPSEGSAPGSPAGSPTSTEEGTSTEPSEGSAPGTSESATPESGPGSEPAT | |
| | SGSETPGTSESATPESGPGSEPATSGSETPGTSESATPESGPGTSTEPSEGSAPGTSES | |
| | ATPESGPGSPAGSPTSTEEGSPAGSPTSTEEGSPAGSPTSTEEGTSESATPESGPGTS | |
| | TEPSEGSAPGGKPGR | |
| Seg 72 | AEATTAAGGAEEEGSPAGSPTSTEEGTSESATPESGPGTSTEPSEGSAPGSPAGSPT | 264 |
| | STEEGTSTEPSEGSAPGTSTEPSEGSAPGTSESATPESGPGSEPATSGSETPGSEPAT | |
| | SGSETPGSPAGSPTSTEEGTSESATPESGPGTSTEPSEGSAPGTSTEPSEGSAPGSPA | |
| | GSPTSTEEGTSTEPSEGSAPGTSTEPSEGSAPGTSESATPESGPGTSTEPSEGSAPGT | |
| | SESATPESGPGSEPATSGSETPGTSTEPSEGSAPGTSTEPSEGSAPGTSESATPESGP | |
| | GTSESATPESGPGSPAGSPTSTEEGTSESATPESGPGSEPATSGSETPGTSESATPES | |
| | GPGTSTEPSEGSAPGTSTEPSEGSAPGTSTEPSEGSAPGTSTEPSEGSAPGTSTEPSE | |
| | GSAPGTSTEPSEGSAPGSPAGSPTSTEEGTSTEPSEGSAPGGKPGR | |
| Seg 73 | AEATTAAGGAEEEGSPAGSPTSTEEGTSESATPESGPGTSTEPSEGSAPGSPAGSPT | 265 |
| | STEEGTSTEPSEGSAPGTSTEPSEGSAPGTSESATPESGPGSEPATSGSETPGSEPAT | |
| | SGSETPGSPAGSPTSTEEGTSESATPESGPGTSTEPSEGSAPGTSTEPSEGSAPGSPA | |
| | GSPTSTEEGTSTEPSEGSAPGTSTEPSEGSAPGTSESATPESGPGTSTEPSEGSAPGT | |
| | SESATPESGPGSEPATSGSETPGTSTEPSEGSAPGTSTEPSEGSAPGTSESATPESGP | |
| | GTSESATPESGPGGKPGR | |
| Seg 74 | AEATTAAGGAEEEGSPAGSPTSTEEGTSESATPESGPGTSTEPSEGSAPGSPAGSPT | 266 |
| | STEEGTSTEPSEGSAPGTSTEPSEGSAPGTSESATPESGPGSEPATSGSETPGSEPAT | |
| | SGSETPGSPAGSPTSTEEGTSESATPESGPGTSTEPSEGSAPGGKPGR | |
| Seg 75 | AGASPGTSSTGSPGSSPSASTGTGPGSSPSASTGTGPGTPGSGTASSSPGSSTPSGAT | 267 |
| | GSPGSSPSASTGTGPGASPGTSSTGSPGTPGSGTASSSPGSSTPSGATGSPGTPGSGT | |
| | ASSSPGASPGTSSTGSPGASPGTSSTGSPGTPGSGTASSSPGSSTPSGATGSPGASPG | |
| | TSSTGSPGTPGSGTASSSPGSSTPSGATGSPGSSPSASTGTGPGSSPSASTGTGPGSS | |
| | TPSGATGSPGSSTPSGATGSPGASPGTSSTGSPGASPGTSSTGSPGASPGTSSTGSPG | |
| | TPGSGTASSSPGASPGTSSTGSPGASPGTSSTGSPGASPGTSSTGSPGSSPSASTGTG | |
| | PGTPGSGTASSSPGASPGTSSTGSPGASPGTSSTGSPGASPGTSSTGSPGSSTPSGAT | |
| | GSPGSSTPSGATGSPGASPGTSSTGSPTAEAAGCGTAEAAGTPGSGTASSSPGSSTP | |
| | SGATGSPGSSTPSGATGSPGSSTPSGATGSPGSSPSASTGTGPGASPGTSSTGSPGAS | |
| | PGTSSTGSPGTPGSGTASSSPGASPGTSSTGSPGASPGTSSTGSPGASPGTSSTGSPG | |
| | ASPGTSSTGSPGTPGSGTASSSPGSSTPSGATGSPGTPGSGTASSSPGSSTPSGATGS | |
| | PGTPGSGTASSSPGSSTPSGATGSPGSSTPSGATGSPGSSPSASTGTGPGSSPSASTG | |
| | TGPGASPGTSSTGSPGTPGSGTASSSPGSSTPSGATGSPGSSPSASTGTGPGSSPSAS | |
| | TGTGPGASPGTSSTGSPGASPGTSSTGSPGSSTPSGATGSPGSSPSASTGTGPGASP | |
| | GTSSTGSPGSSPSASTGTGPGTPGSGTASSSPGSSTPSGATGSPGSSTPSGATGSPGA | |
| | SPGTSSTGSPR | |
| Seg 76 | ATAEAAGCGTAEAAGASPGTSSTGSPGSSPSASTGTGPGSSPSASTGTGPGTPGSG | 268 |
| | TASSSPGSSTPSGATGSPGSSPSASTGTGPGASPGTSSTGSPGTPGSGTASSSPGSST | |
| | PSGATGSPGTPGSGTASSSPGASPGTSSTGSPGASPGTSSTGSPGTPGSGTASSSPGS | |
| | STPSGATGSPGASPGTSSTGSPGTPGSGTASSSPGSSTPSGATGSPGSSPSASTGTGP | |
| | GSSPSASTGTGPGSSTPSGATGSPGSSTPSGATGSPGASPGTSSTGSPGASPGTSSTG | |
| | SPGASPGTSSTGSPGTPGSGTASSSPGASPGTSSTGSPGASPGTSSTGSPGASPGTSS | |
| | TGSPGSSPSASTGTGPGTPGSGTASSSPGASPGTSSTGSPGASPGTSSTGSPGASPGT | |
| | SSTGSPGSSTPSGATGSPGSSTPSGATGSPGASPGTSSTGSPGTPGSGTASSSPGSST | |
| | PSGATGSPGSSTPSGATGSPGSSTPSGATGSPGSSPSASTGTGPGASPGTSSTGSPGA | |
| | SPGTSSTGSPGTPGSGTASSSPGASPGTSSTGSPGASPGTSSTGSPGASPGTSSTGSP | |
| | GASPGTSSTGSPGTPGSGTASSSPGSSTPSGATGSPGTPGSGTASSSPGSSTPSGATG | |
| | SPGTPGSGTASSSPGSSTPSGATGSPGSSTPSGATGSPGSSPSASTGTGPGSSPSAST | |
| | GTGPGASPGTSSTGSPGTPGSGTASSSPGSSTPSGATGSPGSSPSASTGTGPGSSPSA | |
| | STGTGPGASPGTSSTGSPGASPGTSSTGSPGSSTPSGATGSPGSSPSASTGTGPGASP | |
| | GTSSTGSPGSSPSASTGTGPGTPGSGTASSSPGSSTPSGATGSPGSSTPSGATGSPGA | |
| | SPGTSSTGSPTAEAAGCGTAEAAR | |
| Seg 77 | ATAEAAGCGTAEAAGASPGTSSTGSPGSSPSASTGTGPGSSPSASTGTGPGTPGSG | 269 |
| | TASSSPGSSTPSGATGSPGSSPSASTGTGPGASPGTSSTGSPGTPGSGTASSSPGSST | |
| | PSGATGSPGTPGSGTASSSPGASPGTSSTGSPGASPGTSSTGSPGTPGSGTASSSPGS | |
| | STPSGATGSPGASPGTSSTGSPGTPGSGTASSSPGSSTPSGATGSPGSSPSASTGTGP | |
| | GSSPSASTGTGPGSSTPSGATGSPGSSTPSGATGSPGASPGTSSTGSPGASPGTSSTG | |
| | SPGASPGTSSTGSPGTPGSGTASSSPGASPGTSSTGSPGASPGTSSTGSPGASPGTSS | |
| | TGSPGSSPSASTGTGPGTPGSGTASSSPGASPGTSSTGSPGASPGTSSTGSPGASPGT | |
| | SSTGSPGSSTPSGATGSPGSSTPSGATGSPGASPGTSSTGSPTAEAAGCGTAEAAGT | |
| | PGSGTASSSPGSSTPSGATGSPGSSTPSGATGSPGSSTPSGATGSPGSSPSASTGTGP | |
| | GASPGTSSTGSPGASPGTSSTGSPGTPGSGTASSSPGASPGTSSTGSPGASPGTSSTG | |
| | SPGASPGTSSTGSPGASPGTSSTGSPGTPGSGTASSSPGSSTPSGATGSPGTPGSGTA | |
| | SSSPGSSTPSGATGSPGTPGSGTASSSPGSSTPSGATGSPGSSTPSGATGSPGSSPSAS | |
| | TGTGPGSSPSASTGTGPGASPGTSSTGSPGTPGSGTASSSPGSSTPSGATGSPGSSPS | |
| | ASTGTGPGSSPSASTGTGPGASPGTSSTGSPGASPGTSSTGSPGSSTPSGATGSPGSS | |
| | PSASTGTGPGASPGTSSTGSPGSSPSASTGTGPGTPGSGTASSSPGSSTPSGATGSPG | |
| | SSTPSGATGSPGASPGTSSTGSPTAEAAGCGTAEAAR | |
| Seg 78 | ATAEAAGCGTAEAAGASPGTSSTGSPGSSPSASTGTGPGSSPSASTGTGPGTPGSG | 270 |
| | TASSSPGSSTPSGATGSPGSSPSASTGTGPGASPGTSSTGSPGTPGSGTASSSPGSST | |
| | PSGATGSPGTPGSGTASSSPGASPGTSSTGSPGASPGTSSTGSPGTPGSGTASSSPGS | |
| | STPSGATGSPGASPGTSSTGSPGTPGSGTASSSPGSSTPSGATGSPGSSPSASTGTGP | |
| | GSSPSASTGTGPGSSTPSGATGSPGSSTPSGATGSPGASPGTSSTGSPGASPGTSSTG | |
| | SPGASPGTSSTGSPTAEAAGCGTAEAAGTPGSGTASSSPGASPGTSSTGSPGASPGT | |
| | SSTGSPGASPGTSSTGSPGSSPSASTGTGPGTPGSGTASSSPGASPGTSSTGSPGASP | |
| | GTSSTGSPGASPGTSSTGSPGSSTPSGATGSPGSSTPSGATGSPGASPGTSSTGSPGT | |
| | PGSGTASSSPGSSTPSGATGSPGSSTPSGATGSPGSSTPSGATGSPGSSPSASTGTGP | |
| | GASPGTSSTGSPGASPGTSSTGSPGTPGSGTASSSPGASPGTSSTGSPGASPGTSSTG | |
| | SPGASPGTSSTGSPGASPGTSSTGSPTAEAAGCGTAEAAGTPGSGTASSSPGSSTPS | |
| | GATGSPGTPGSGTASSSPGSSTPSGATGSPGTPGSGTASSSPGSSTPSGATGSPGSST | |
| | PSGATGSPGSSPSASTGTGPGSSPSASTGTGPGASPGTSSTGSPGTPGSGTASSSPGS | |
| | STPSGATGSPGSSPSASTGTGPGSSPSASTGTGPGASPGTSSTGSPGASPGTSSTGSP | |
| | GSSTPSGATGSPGSSPSASTGTGPGASPGTSSTGSPGSSPSASTGTGPGTPGSGTASS | |
| | SPGSSTPSGATGSPGSSTPSGATGSPGASPGTSSTGSPTAEAAGCGTAEAAR | |
| Seg 79 | ATAEAAGCGTAEAAGASPGTSSTGSPGSSPSASTGTGPGSSPSASTGTGPGTPGSG | 271 |
| | TASSSPGSSTPSGATGSPGSSPSASTGTGPGASPGTSSTGSPGTPGSGTASSSPGSST | |
| | PSGATGSPGTPGSGTASSSPGASPGTSSTGSPGASPGTSSTGSPGTPGSGTASSSPGS | |
| | STPSGATGSPGASPGTSSTGSPGTPGSGTASSSPGSSTPSGATGSPGSSPSASTGTGP | |
| | TAEAAGCGTAEAAGSSPSASTGTGPGSSTPSGATGSPGSSTPSGATGSPGASPGTSS | |
| | TGSPGASPGTSSTGSPGASPGTSSTGSPGTPGSGTASSSPGASPGTSSTGSPGASPGT | |
| | SSTGSPGASPGTSSTGSPGSSPSASTGTGPGTPGSGTASSSPGASPGTSSTGSPGASP | |
| | GTSSTGSPGASPGTSSTGSPGSSTPSGATGSPGSSTPSGATGSPGASPGTSSTGSPTA | |
| | EAAGCGTAEAAGTPGSGTASSSPGSSTPSGATGSPGSSTPSGATGSPGSSTPSGATG | |
| | SPGSSPSASTGTGPGASPGTSSTGSPGASPGTSSTGSPGTPGSGTASSSPGASPGTSS | |
| | TGSPGASPGTSSTGSPGASPGTSSTGSPGASPGTSSTGSPGTPGSGTASSSPGSSTPS | |
| | GATGSPGTPGSGTASSSPGSSTPSGATGSPGTPGSGTASSSPGSSTPSGATGSPTAE | |
| | AAGCGTAEAAGSSTPSGATGSPGSSPSASTGTGPGSSPSASTGTGPGASPGTSSTGS | |
| | PGTPGSGTASSSPGSSTPSGATGSPGSSPSASTGTGPGSSPSASTGTGPGASPGTSST | |
| | GSPGASPGTSSTGSPGSSTPSGATGSPGSSPSASTGTGPGASPGTSSTGSPGSSPSAS | |
| | TGTGPGTPGSGTASSSPGSSTPSGATGSPGSSTPSGATGSPGASPGTSSTGSPTAEA | |
| | AGCGTAEAAR | |
| Seg 80 | ATAEAAGCGTAEAAGASPGTSSTGSPGSSPSASTGTGPGSSPSASTGTGPGTPGSG | 272 |
| | TASSSPGSSTPSGATGSPGSSPSASTGTGPGASPGTSSTGSPGTPGSGTASSSPGSST | |
| | PSGATGSPGTPGSGTASSSPGASPGTSSTGSPGASPGTSSTGSPGTPGSGTASSSPGS | |
| | STPSGATGSPGASPGTAEAAGCGTAEAATSSTGSPGTPGSGTASSSPGSSTPSGAT | |
| | GSPGSSPSASTGTGPGSSPSASTGTGPGSSTPSGATGSPGSSTPSGATGSPGASPGTS | |
| | STGSPGASPGTSSTGSPGASPGTSSTGSPGTPGSGTASSSPGASPGTSSTGSPGASPG | |
| | TSSTGSPGASPGTSSTGSPGSSPSASTGTTAEAAGCGTAEAAGPGTPGSGTASSSPG | |
| | ASPGTSSTGSPGASPGTSSTGSPGASPGTSSTGSPGSSTPSGATGSPGSSTPSGATGS | |
| | PGASPGTSSTGSPGTPGSGTASSSPGSSTPSGATGSPGSSTPSGATGSPGSSTPSGAT | |
| | GSPGSSPSASTGTGPGASPGTSSTGSPGASPGTSSTGSPGTTAEAAGCGTAEAAPGS | |
| | GTASSSPGASPGTSSTGSPGASPGTSSTGSPGASPGTSSTGSPGASPGTSSTGSPGTP | |
| | GSGTASSSPGSSTPSGATGSPGTPGSGTASSSPGSSTPSGATGSPGTPGSGTASSSPG | |
| | SSTPSGATGSPGSSTPSGATGSPGSSPSASTGTGPGSSPSASTGTGPGASPGTSTAEA | |
| | AGCGTAEAASTGSPGTPGSGTASSSPGSSTPSGATGSPGSSPSASTGTGPGSSPSAS | |
| | TGTGPGASPGTSSTGSPGASPGTSSTGSPGSSTPSGATGSPGSSPSASTGTGPGASP | |
| | GTSSTGSPGSSPSASTGTGPGTPGSGTASSSPGSSTPSGATGSPGSSTPSGATGSPGA | |
| | SPGTSSTGSPTAEAAGCGTAEAAR | |
| Seg 81 | ATAEAAGCGTAEAAGASPGTSSTGSPGSSPSASTGTGPGSSPSASTGTGPGTPGSG | 273 |
| | TASSSPGSSTPSGATGSPGSSPSASTGTGPGASPGTSSTGSPGTPGSGTASSSPGSST | |
| | PSGATGSPGTPGSGTASSSPGASPGTSSTGSPGASPGTSSTGSPTAEAAGCGTAEAA | |
| | GTPGSGTASSSPGSSTPSGATGSPGASPGTSSTGSPGTPGSGTASSSPGSSTPSGATG | |
| | SPGSSPSASTGTGPGSSPSASTGTGPGSSTPSGATGSPGSSTPSGATGSPGASPGTSS | |
| | TGSPGASPGTSSTGSPGASPGTSSTGSPTAEAAGCGTAEAAGTPGSGTASSSPGASP | |
| | GTSSTGSPGASPGTSSTGSPGASPGTSSTGSPGSSPSASTGTGPGTPGSGTASSSPGA | |
| | SPGTSSTGSPGASPGTSSTGSPGASPGTSSTGSPGSSTPSGATGSPGSSTPSGATGSP | |
| | GASPGTSSTGSPTAEAAGCGTAEAAGTPGSGTASSSPGSSTPSGATGSPGSSTPSGA | |
| | TGSPGSSTPSGATGSPGSSPSASTGTGPGASPGTSSTGSPGASPGTSSTGSPGTPGSG | |
| | TASSSPGASPGTSSTGSPGASPGTSSTGSPGASPGTSSTGSPGASPGTSSTGSPTAEA | |
| | AGCGTAEAAGTPGSGTASSSPGSSTPSGATGSPGTPGSGTASSSPGSSTPSGATGSP | |
| | GTPGSGTASSSPGSSTPSGATGSPGSSTPSGATGSPGSSPSASTGTGPGSSPSASTGT | |
| | GPGASPGTSSTGSPGTPGSGTASSSPGSSTPSGATGSPTAEAAGCGTAEAAGSSPSA | |
| | STGTGPGSSPSASTGTGPGASPGTSSTGSPGASPGTSSTGSPGSSTPSGATGSPGSSP | |
| | SASTGTGPGASPGTSSTGSPGSSPSASTGTGPGTPGSGTASSSPGSSTPSGATGSPGS | |
| | STPSGATGSPGASPGTSSTGSPTAEAAGCGTAEAAR | |
| Seg 82 | ATAEAAGCGTAEAAGASPGTSSTGSPGSSPSASTGTGPGSSPSASTGTGPGTPGSG | 274 |
| | TASSSPGSSTPSGATGSPGSSPSASTGTGPGASPGTSSTGSPGTPGSGTASSSPGSST | |
| | PSGATGSPGTPGSGTASSSPGASTAEAAGCGTAEAAPGTSSTGSPGASPGTSSTGSP | |
| | GTPGSGTASSSPGSSTPSGATGSPGASPGTSSTGSPGTPGSGTASSSPGSSTPSGATG | |
| | SPGSSPSASTGTGPGSSPSASTGTGPGSSTPSGATGSPGSSTPSGTAEAAGCGTAEA | |
| | AATGSPGASPGTSSTGSPGASPGTSSTGSPGASPGTSSTGSPGTPGSGTASSSPGASP | |
| | GTSSTGSPGASPGTSSTGSPGASPGTSSTGSPGSSPSASTGTGPGTPGSGTASSSPGA | |
| | SPGTSSTGTAEAAGCGTAEAASPGASPGTSSTGSPGASPGTSSTGSPGSSTPSGATG | |
| | SPGSSTPSGATGSPGASPGTSSTGSPGTPGSGTASSSPGSSTPSGATGSPGSSTPSGA | |
| | TGSPGSSTPSGATGSPGSSPSASTGTGPGATAEAAGCGTAEAASPGTSSTGSPGASP | |
| | GTSSTGSPGTPGSGTASSSPGASPGTSSTGSPGASPGTSSTGSPGASPGTSSTGSPGA | |
| | SPGTSSTGSPGTPGSGTASSSPGSSTPSGATGSPGTPGSGTASSSPGSSTPTAEAAGC | |
| | GTAEAASGATGSPGTPGSGTASSSPGSSTPSGATGSPGSSTPSGATGSPGSSPSAST | |
| | GTGPGSSPSASTGTGPGASPGTSSTGSPGTPGSGTASSSPGSSTPSGATGSPGSSPSA | |
| | STGTGPGSSPSASTGTAEAAGCGTAEAATGPGASPGTSSTGSPGASPGTSSTGSPG | |
| | SSTPSGATGSPGSSPSASTGTGPGASPGTSSTGSPGSSPSASTGTGPGTPGSGTASSS | |
| | PGSSTPSGATGSPGSSTPSGATGSPGASPGTSSTGSPTAEAAGCGTAEAAR | |
| Seg 83 | ATAEAAGCGTAEAAGASPGTSSTGSPGSSPSASTGTGPGSSPSASTGTGPGTPGSG | 275 |
| | TASSSPGSSTPSGATGSPGSSPSASTGTGPGASPGTSSTGSPGTPGSGTASSSPGSST | |
| | PSGATGSPGTPGSGTASSSPGASPGTSSTGSPGASPGTSSTGSPGTPGSGTASSSPGS | |
| | STPSGATGSPGASPGTSSTGSPGTPGSGTASSSPGSSTPSGATGSPGSSPSASTGTGP | |
| | GSSPSASTGTGPGSSTPSGATGSPGSSTPSGATGSPGASPGTSSTGSPGASPGTSSTG | |
| | SPGASPGTSSTGSPGTPGSGTASSSPGASPGTSSTGSPGASPGTSSTGSPGASPGTSS | |
| | TGSPGSSPSASTGTGPGTPGSGTASSSPGASPGTSSTGSPGASPGTSSTGSPGASPGT | |
| | SSTGSPGSSTPSGATGSPGSSTPSGATGSPGASPGTSSTGSPGTPGSGTASSSPGSST | |
| | PSGATGSPGSSTPSGATGSPGSSTPSGATGSPGSSPSASTGTGPGASPGTSSTGSPGA | |
| | SPGTSSTGSPGTPGSGTASSSPGASPGTSSTGSPGASPGTSSTGSPGASPGTSSTGSP | |
| | GASPGTSSTGSPGTPGSGTASSSPGSSTPSGATGSPGTPGSGTASSSPGSSTPSGATG | |
| | SPGTPGSGTASSSPGSSTPSGATGSPGSSTPSGATGSPGSSPSASTGTGPGSSPSAST | |
| | GTGPGASPGTSSTGSPGTPGSGTASSSPGSSTPSGATGSPGSSPSASTGTGPGSSPSA | |
| | STGTGPGASPGTSSTGSPGASPGTSSTGSPGSSTPSGATGSPGSSPSASTGTGPGASP | |
| | GTSSTGSPGSSPSASTGTGPGTPGSGTASSSPGSSTPSGATGSPGSSTPSGATGSPGA | |
| | SPGTSSTGSPR | |
| Seg 84 | AGASPGTSSTGSPGSSPSASTGTGPGSSPSASTGTGPGTPGSGTASSSPGSSTPSGAT | 276 |
| | GSPGSSPSASTGTGPGASPGTSSTGSPGTPGSGTASSSPGSSTPSGATGSPGTPGSGT | |
| | ASSSPGASPGTSSTGSPGASPGTSSTGSPGTPGSGTASSSPGSSTPSGATGSPGASPG | |
| | TSSTGSPGTPGSGTASSSPGSSTPSGATGSPGSSPSASTGTGPGSSPSASTGTGPGSS | |
| | TPSGATGSPGSSTPSGATGSPGASPGTSSTGSPGASPGTSSTGSPGASPGTSSTGSPG | |
| | TPGSGTASSSPGASPGTSSTGSPGASPGTSSTGSPGASPGTSSTGSPGSSPSASTGTG | |
| | PGTPGSGTASSSPGASPGTSSTGSPGASPGTSSTGSPGASPGTSSTGSPGSSTPSGAT | |
| | GSPGSSTPSGATGSPGASPGTSSTGSPGTPGSGTASSSPGSSTPSGATGSPGSSTPSG | |
| | ATGSPGSSTPSGATGSPGSSPSASTGTGPGASPGTSSTGSPGASPGTSSTGSPGTPGS | |
| | GTASSSPGASPGTSSTGSPGASPGTSSTGSPGASPGTSSTGSPGASPGTSSTGSPGTP | |
| | GSGTASSSPGSSTPSGATGSPGTPGSGTASSSPGSSTPSGATGSPGTPGSGTASSSPG | |
| | SSTPSGATGSPGSSTPSGATGSPGSSPSASTGTGPGSSPSASTGTGPGASPGTSSTGS | |
| | PGTPGSGTASSSPGSSTPSGATGSPGSSPSASTGTGPGSSPSASTGTGPGASPGTSST | |
| | GSPGASPGTSSTGSPGSSTPSGATGSPGSSPSASTGTGPGASPGTSSTGSPGSSPSAS | |
| | TGTGPGTPGSGTASSSPGSSTPSGATGSPGSSTPSGATGSPGASPGTSSTGSPTAEA | |
| | AGCGTAEAAR | |
| Seg 85 | ATAEAAGCGTAEAAGASPGTSSTGSPGSSPSASTGTGPGSSPSASTGTGPGTPGSG | 277 |
| | TASSSPGSSTPSGATGSPGSSPSASTGTGPGASPGTSSTGSPGTPGSGTASSSPGSST | |
| | PSGATGSPGTPGSGTASSSPGASPGTSSTGSPGASPGTSSTGSPGTPGSGTASSSPGS | |
| | STPSGATGSPGASPGTSSTGSPGTPGSGTASSSPGSSTPSGATGSPGSSPSASTGTGP | |
| | GSSPSASTGTGPGSSTPSGATGSPGSSTPSGATGSPGASPGTSSTGSPGASPGTSSTG | |
| | SPGASPGTSSTGSPGTPGSGTASSSPGASPGTSSTGSPGASPGTSSTGSPGASPGTSS | |
| | TGSPGSSPSASTGTGPGTPGSGTASSSPGASPGTSSTGSPGASPGTSSTGSPGASPGT | |
| | SSTGSPGSSTPSGATGSPGSSTPSGATGSPGASPGTSSTGSPTAEAAGCGTAEAAGT | |
| | PGSGTASSSPGSSTPSGATGSPGSSTPSGATGSPGSSTPSGATGSPGSSPSASTGTGP | |
| | GASPGTSSTGSPGASPGTSSTGSPGTPGSGTASSSPGASPGTSSTGSPGASPGTSSTG | |
| | SPGASPGTSSTGSPGASPGTSSTGSPGTPGSGTASSSPGSSTPSGATGSPGTPGSGTA | |
| | SSSPGSSTPSGATGSPGTPGSGTASSSPGSSTPSGATGSPGSSTPSGATGSPGSSPSAS | |
| | TGTGPGSSPSASTGTGPGASPGTSSTGSPGTPGSGTASSSPGSSTPSGATGSPGSSPS | |
| | ASTGTGPGSSPSASTGTGPGASPGTSSTGSPGASPGTSSTGSPGSSTPSGATGSPGSS | |
| | PSASTGTGPGASPGTSSTGSPGSSPSASTGTGPGTPGSGTASSSPGSSTPSGATGSPG | |
| | SSTPSGATGSPGASPGTSSTGSPR | |
| Seg 86 | AGASPGTSSTGSPGSSPSASTGTGPGSSPSASTGTGPGTPGSGTASSSPGSSTPSGAT | 278 |
| | GSPGSSPSASTGTGPGASPGTSSTGSPGTPGSGTASSSPGSSTPSGATGSPGTPGSGT | |
| | ASSSPGASPGTSSTGSPGASPGTSSTGSPGTPGSGTASSSPGSSTPSGATGSPGASPG | |
| | TSSTGSPGTPGSGTASSSPGSSTPSGATGSPGSSPSASTGTGPGSSPSASTGTGPGSS | |
| | TPSGATGSPGSSTPSGATGSPGASPGTSSTGSPGASPGTSSTGSPGASPGTSSTGSPG | |
| | TPGSGTASSSPGASPGTSSTGSPGASPGTSSTGSPGASPGTSSTGSPGSSPSASTGTG | |
| | PGTPGSGTASSSPGASPGTSSTGSPGASPGTSSTGSPGASPGTSSTGSPGSSTTAEAA | |
| | GCGTAEAAPSGATGSPGSSTPSGATGSPGASPGTSSTGSPGTPGSGTASSSPGSSTP | |
| | STAEAAGCGTAEAAGATGSPGSSTPSGATGSPGSSTPSGATGSPGSSPSASTGTGP | |
| | GASPGTSSTGSPGASPGTSSTGSPGTPGSGTASSSPGASPGTSSTGSPGASPGTSSTG | |
| | SPGASPGTSSTGSPGASPGTSSTGSPGTPGSGTASSSPGSSTPSGATGSPGTPGSGTA | |
| | SSSPGSSTPSGATGSPGTPGSGTASSSPGSSTPSGATGSPGSSTPSGATGSPGSSPSAS | |
| | TGTGPGSSPSASTGTGPGASPGTSSTGSPGTPGSGTASSSPGSSTPSGATGSPGSSPS | |
| | ASTGTGPGSSPSASTGTGPGASPGTSSTGSPGASPGTSSTGSPGSSTPSGATGSPGSS | |
| | PSASTGTGPGASPGTSSTGSPGSSPSASTGTGPGTPGSGTASSSPGSSTPSGATGSPG | |
| | SSTPSGATGSPGASPGTSSTGSPR | |
| Seg 87 | AGASPGTSSTGSPGSSPSASTGTGPGSSPSASTGTGPGTPGSGTASSSPGSSTPSGAT | 279 |
| | GSPGSSPSASTGTGPGASPGTSSTGSPGTPGSGTASSSPGSSTPSGATGSPGTPGSGT | |
| | ASSSPGASPGTSSTGSPGASPGTSSTGSPGTPGSGTASSSPGSSTPSGATGSPGASPG | |
| | TSSTGSPGTPGSGTASSSPGSSTPSGATGSPGSSPSASTGTGPGSSPSASTGTGPGSS | |
| | TPSGATGSPGSSTPSGATGSPGASPGTSSTGSPGASPGTSSTGSPGASPGTSSTGSPG | |
| | TPGSGTASSSPGASPGTSSTGSPGASPGTSSTGSPGASPGTSSTGSPGSSPSASTGTG | |
| | PGTPGSGTASSSPGASPGTSSTGSPGASPGTSSTGSPGASPGTSSTGSPGSSTPSGAT | |
| | GSPGSSTPSGATGSPGASPGTSSTGSPTAEAAGCGTAEAAGTPGSGTASSSPGSSTP | |
| | SGATGSPGSSTPSGATGSPGSSTPSGATGSPGSSPSASTGTGPGASPGTSSTGSPGAS | |
| | PGTSSTGSPGTPGSGTASSSPGASPGTSSTGSPGASPGTSSTGSPGASPGTSSTGSPG | |
| | ASPGTSSTGSPGTPGSGTASSSPGSSTPSGATGSPGTPGSGTASSSPGSSTPSGATGS | |
| | PGTPGSGTASSSPGSSTPSGATGSPGSSTPSGATGSPGSSPSASTGTGPGSSPSASTG | |
| | TGPGASPGTSSTGSPGTPGSGTASSSPGSSTPSGATGSPGSSPSASTGTGPGSSPSAS | |
| | TGTGPGASPGTSSTGSPGASPGTSSTGSPGSSTPSGATGSPGSSPSASTGTGPGASP | |
| | GTSSTGSPGSSPSASTGTGPGTPGSGTASSSPGSSTPSGATGSPGSSTPSGATGSPGA | |
| | SPGTSSTGSPTAEAAGCGTAEAAR | |
| Seg 88 | AGASPGTSSTGSPGSSPSASTGTGPGSSPSASTGTGPGTPGSGTASSSPGSSTPSGAT | 280 |
| | GSPGSSPSASTGTGPGASPGTSSTGSPGTPGSGTASSSPGSSTPSGATGSPGTPGSGT | |
| | ASSSPGASPGTSSTGSPGASPGTSSTGSPGTPGSGTASSSPGSSTPSGATGSPGASPG | |
| | TSSTGSPGTPGSGTASSSPGSSTPSGATGSPGSSPSASTGTGPGSSPSASTGTGPGSS | |
| | TPSGATGSPGSSTPSGATGSPGASPGTSSTGSPGASPGTSSTGSPGASPGTSSTGSPG | |
| | TPGSGTASSSPGASPGTSSTGSPGASPGTSSTGSPGASPGTSSTGSPGSSPSASTGTG | |
| | PGTPGSGTASSSPGASPGTSSTGSPGASPGTSSTGSPGASPGTSSTGSPGSSTPSGAT | |
| | GSPGSSTPSGATGSPGASPGTSSTGSPGGKPGGTPGSGTASSSPGSSTPSGATGSPG | |
| | SSTPSGATGSPGSSTPSGATGSPGSSPSASTGTGPGASPGTSSTGSPGASPGTSSTGS | |
| | PGTPGSGTASSSPGASPGTSSTGSPGASPGTSSTGSPGASPGTSSTGSPGASPGTSST | |
| | GSPGTPGSGTASSSPGSSTPSGATGSPGTPGSGTASSSPGSSTPSGATGSPGTPGSGT | |
| | ASSSPGSSTPSGATGSPGSSTPSGATGSPGSSPSASTGTGPGSSPSASTGTGPGASPG | |
| | TSSTGSPGTPGSGTASSSPGSSTPSGATGSPGSSPSASTGTGPGSSPSASTGTGPGAS | |
| | PGTSSTGSPGASPGTSSTGSPGSSTPSGATGSPGSSPSASTGTGPGASPGTSSTGSPG | |
| | SSPSASTGTGPGTPGSGTASSSPGSSTPSGATGSPGSSTPSGATGSPGASPGTSSTGS | |
| | PR | |
| Seg 89 | AGGKPGGASPGTSSTGSPGSSPSASTGTGPGSSPSASTGTGPGTPGSGTASSSPGSS | 281 |
| | TPSGATGSPGSSPSASTGTGPGASPGTSSTGSPGTPGSGTASSSPGSSTPSGATGSPG | |
| | TPGSGTASSSPGASPGTSSTGSPGASPGTSSTGSPGTPGSGTASSSPGSSTPSGATGS | |
| | PGASPGTSSTGSPGTPGSGTASSSPGSSTPSGATGSPGSSPSASTGTGPGSSPSASTG | |
| | TGPGSSTPSGATGSPGSSTPSGATGSPGASPGTSSTGSPGASPGTSSTGSPGASPGTS | |
| | STGSPGTPGSGTASSSPGASPGTSSTGSPGASPGTSSTGSPGASPGTSSTGSPGSSPS | |
| | ASTGTGPGTPGSGTASSSPGASPGTSSTGSPGASPGTSSTGSPGASPGTSSTGSPGSS | |
| | TPSGATGSPGSSTPSGATGSPGASPGTSSTGSPGTPGSGTASSSPGSSTPSGATGSPG | |
| | SSTPSGATGSPGSSTPSGATGSPGSSPSASTGTGPGASPGTSSTGSPGASPGTSSTGS | |
| | PGTPGSGTASSSPGASPGTSSTGSPGASPGTSSTGSPGASPGTSSTGSPGASPGTSST | |
| | GSPGTPGSGTASSSPGSSTPSGATGSPGTPGSGTASSSPGSSTPSGATGSPGTPGSGT | |
| | ASSSPGSSTPSGATGSPGSSTPSGATGSPGSSPSASTGTGPGSSPSASTGTGPGASPG | |
| | TSSTGSPGTPGSGTASSSPGSSTPSGATGSPGSSPSASTGTGPGSSPSASTGTGPGAS | |
| | PGTSSTGSPGASPGTSSTGSPGSSTPSGATGSPGSSPSASTGTGPGASPGTSSTGSPG | |
| | SSPSASTGTGPGTPGSGTASSSPGSSTPSGATGSPGSSTPSGATGSPGASPGTSSTGS | |
| | PGGKPGR | |
| Seg 90 | AGGKPGGASPGTSSTGSPGSSPSASTGTGPGSSPSASTGTGPGTPGSGTASSSPGSS | 282 |
| | TPSGATGSPGSSPSASTGTGPGASPGTSSTGSPGTPGSGTASSSPGSSTPSGATGSPG | |
| | TPGSGTASSSPGASPGTSSTGSPGASPGTSSTGSPGTPGSGTASSSPGSSTPSGATGS | |
| | PGASPGTSSTGSPGTPGSGTASSSPGSSTPSGATGSPGSSPSASTGTGPGSSPSASTG | |
| | TGPGSSTPSGATGSPGSSTPSGATGSPGASPGTSSTGSPGASPGTSSTGSPGASPGTS | |
| | STGSPGTPGSGTASSSPGASPGTSSTGSPGASPGTSSTGSPGASPGTSSTGSPGSSPS | |
| | ASTGTGPGTPGSGTASSSPGASPGTSSTGSPGASPGTSSTGSPGASPGTSSTGSPGSS | |
| | TPSGATGSPGSSTPSGATGSPGASPGTSSTGSPGGKPGGTPGSGTASSSPGSSTPSG | |
| | ATGSPGSSTPSGATGSPGSSTPSGATGSPGSSPSASTGTGPGASPGTSSTGSPGASPG | |
| | TSSTGSPGTPGSGTASSSPGASPGTSSTGSPGASPGTSSTGSPGASPGTSSTGSPGAS | |
| | PGTSSTGSPGTPGSGTASSSPGSSTPSGATGSPGTPGSGTASSSPGSSTPSGATGSPG | |
| | TPGSGTASSSPGSSTPSGATGSPGSSTPSGATGSPGSSPSASTGTGPGSSPSASTGTG | |
| | PGASPGTSSTGSPGTPGSGTASSSPGSSTPSGATGSPGSSPSASTGTGPGSSPSASTG | |
| | TGPGASPGTSSTGSPGASPGTSSTGSPGSSTPSGATGSPGSSPSASTGTGPGASPGTS | |
| | STGSPGSSPSASTGTGPGTPGSGTASSSPGSSTPSGATGSPGSSTPSGATGSPGASPG | |
| | TSSTGSPGGKPGR | |
| Seg 91 | AGGKPGGASPGTSSTGSPGSSPSASTGTGPGSSPSASTGTGPGTPGSGTASSSPGSS | 283 |
| | TPSGATGSPGSSPSASTGTGPGASPGTSSTGSPGTPGSGTASSSPGSSTPSGATGSPG | |
| | TPGSGTASSSPGASPGTSSTGSPGASPGTSSTGSPGTPGSGTASSSPGSSTPSGATGS | |
| | PGASPGTSSTGSPGTPGSGTASSSPGSSTPSGATGSPGSSPSASTGTGPGSSPSASTG | |
| | TGPGSSTPSGATGSPGSSTPSGATGSPGASPGTSSTGSPGASPGTSSTGSPGASPGTS | |
| | STGSPGGKPGGTPGSGTASSSPGASPGTSSTGSPGASPGTSSTGSPGASPGTSSTGSP | |
| | GSSPSASTGTGPGTPGSGTASSSPGASPGTSSTGSPGASPGTSSTGSPGASPGTSSTG | |
| | SPGSSTPSGATGSPGSSTPSGATGSPGASPGTSSTGSPGTPGSGTASSSPGSSTPSGA | |
| | TGSPGSSTPSGATGSPGSSTPSGATGSPGSSPSASTGTGPGASPGTSSTGSPGASPGT | |
| | SSTGSPGTPGSGTASSSPGASPGTSSTGSPGASPGTSSTGSPGASPGTSSTGSPGASP | |
| | GTSSTGSPGGKPGGTPGSGTASSSPGSSTPSGATGSPGTPGSGTASSSPGSSTPSGA | |
| | TGSPGTPGSGTASSSPGSSTPSGATGSPGSSTPSGATGSPGSSPSASTGTGPGSSPSA | |
| | STGTGPGASPGTSSTGSPGTPGSGTASSSPGSSTPSGATGSPGSSPSASTGTGPGSSP | |
| | SASTGTGPGASPGTSSTGSPGASPGTSSTGSPGSSTPSGATGSPGSSPSASTGTGPG | |
| | ASPGTSSTGSPGSSPSASTGTGPGTPGSGTASSSPGSSTPSGATGSPGSSTPSGATGS | |
| | PGASPGTSSTGSPGGKPGR | |
| Seg 92 | AGGKPGGASPGTSSTGSPGSSPSASTGTGPGSSPSASTGTGPGTPGSGTASSSPGSS | 284 |
| | TPSGATGSPGSSPSASTGTGPGASPGTSSTGSPGTPGSGTASSSPGSSTPSGATGSPG | |
| | TPGSGTASSSPGASPGTSSTGSPGASPGTSSTGSPGTPGSGTASSSPGSSTPSGATGS | |
| | PGASPGTSSTGSPGTPGSGTASSSPGSSTPSGATGSPGSSPSASTGTGPGGKPGGSSP | |
| | SASTGTGPGSSTPSGATGSPGSSTPSGATGSPGASPGTSSTGSPGASPGTSSTGSPG | |
| | ASPGTSSTGSPGTPGSGTASSSPGASPGTSSTGSPGASPGTSSTGSPGASPGTSSTGS | |
| | PGSSPSASTGTGPGTPGSGTASSSPGASPGTSSTGSPGASPGTSSTGSPGASPGTSST | |
| | GSPGSSTPSGATGSPGSSTPSGATGSPGASPGTSSTGSPGGKPGGTPGSGTASSSPG | |
| | SSTPSGATGSPGSSTPSGATGSPGSSTPSGATGSPGSSPSASTGTGPGASPGTSSTGS | |
| | PGASPGTSSTGSPGTPGSGTASSSPGASPGTSSTGSPGASPGTSSTGSPGASPGTSST | |
| | GSPGASPGTSSTGSPGTPGSGTASSSPGSSTPSGATGSPGTPGSGTASSSPGSSTPSG | |
| | ATGSPGTPGSGTASSSPGSSTPSGATGSPGGKPGGSSTPSGATGSPGSSPSASTGTG | |
| | PGSSPSASTGTGPGASPGTSSTGSPGTPGSGTASSSPGSSTPSGATGSPGSSPSASTG | |
| | TGPGSSPSASTGTGPGASPGTSSTGSPGASPGTSSTGSPGSSTPSGATGSPGSSPSAS | |
| | TGTGPGASPGTSSTGSPGSSPSASTGTGPGTPGSGTASSSPGSSTPSGATGSPGSSTP | |
| | SGATGSPGASPGTSSTGSPGGKPGR | |
| Seg 93 | AGGKPGGASPGTSSTGSPGSSPSASTGTGPGSSPSASTGTGPGTPGSGTASSSPGSS | 285 |
| | TPSGATGSPGSSPSASTGTGPGASPGTSSTGSPGTPGSGTASSSPGSSTPSGATGSPG | |
| | TPGSGTASSSPGASPGTSSTGSPGASPGTSSTGSPGTPGSGTASSSPGSSTPSGATGS | |
| | PGASPGGGKPGTSSTGSPGTPGSGTASSSPGSSTPSGATGSPGSSPSASTGTGPGSSP | |
| | SASTGTGPGSSTPSGATGSPGSSTPSGATGSPGASPGTSSTGSPGASPGTSSTGSPG | |
| | ASPGTSSTGSPGTPGSGTASSSPGASPGTSSTGSPGASPGTSSTGSPGASPGTSSTGS | |
| | PGSSPSASTGTGGKPGGPGTPGSGTASSSPGASPGTSSTGSPGASPGTSSTGSPGAS | |
| | PGTSSTGSPGSSTPSGATGSPGSSTPSGATGSPGASPGTSSTGSPGTPGSGTASSSPG | |
| | SSTPSGATGSPGSSTPSGATGSPGSSTPSGATGSPGSSPSASTGTGPGASPGTSSTGS | |
| | PGASPGTSSTGSPGTGGKPGPGSGTASSSPGASPGTSSTGSPGASPGTSSTGSPGAS | |
| | PGTSSTGSPGASPGTSSTGSPGTPGSGTASSSPGSSTPSGATGSPGTPGSGTASSSPG | |
| | SSTPSGATGSPGTPGSGTASSSPGSSTPSGATGSPGSSTPSGATGSPGSSPSASTGTG | |
| | PGSSPSASTGTGPGASPGTSGGKPGSTGSPGTPGSGTASSSPGSSTPSGATGSPGSSP | |
| | SASTGTGPGSSPSASTGTGPGASPGTSSTGSPGASPGTSSTGSPGSSTPSGATGSPGS | |
| | SPSASTGTGPGASPGTSSTGSPGSSPSASTGTGPGTPGSGTASSSPGSSTPSGATGSP | |
| | GSSTPSGATGSPGASPGTSSTGSPGGKPGR | |
| Seg 94 | AGGKPGGASPGTSSTGSPGSSPSASTGTGPGSSPSASTGTGPGTPGSGTASSSPGSS | 286 |
| | TPSGATGSPGSSPSASTGTGPGASPGTSSTGSPGTPGSGTASSSPGSSTPSGATGSPG | |
| | TPGSGTASSSPGASPGTSSTGSPGASPGTSSTGSPGGKPGGTPGSGTASSSPGSSTPS | |
| | GATGSPGASPGTSSTGSPGTPGSGTASSSPGSSTPSGATGSPGSSPSASTGTGPGSSP | |
| | SASTGTGPGSSTPSGATGSPGSSTPSGATGSPGASPGTSSTGSPGASPGTSSTGSPG | |
| | ASPGTSSTGSPGGKPGGTPGSGTASSSPGASPGTSSTGSPGASPGTSSTGSPGASPG | |
| | TSSTGSPGSSPSASTGTGPGTPGSGTASSSPGASPGTSSTGSPGASPGTSSTGSPGAS | |
| | PGTSSTGSPGSSTPSGATGSPGSSTPSGATGSPGASPGTSSTGSPGGKPGGTPGSGT | |
| | ASSSPGSSTPSGATGSPGSSTPSGATGSPGSSTPSGATGSPGSSPSASTGTGPGASPG | |
| | TSSTGSPGASPGTSSTGSPGTPGSGTASSSPGASPGTSSTGSPGASPGTSSTGSPGAS | |
| | PGTSSTGSPGASPGTSSTGSPGGKPGGTPGSGTASSSPGSSTPSGATGSPGTPGSGT | |
| | ASSSPGSSTPSGATGSPGTPGSGTASSSPGSSTPSGATGSPGSSTPSGATGSPGSSPS | |
| | ASTGTGPGSSPSASTGTGPGASPGTSSTGSPGTPGSGTASSSPGSSTPSGATGSPGG | |
| | KPGGSSPSASTGTGPGSSPSASTGTGPGASPGTSSTGSPGASPGTSSTGSPGSSTPSG | |
| | ATGSPGSSPSASTGTGPGASPGTSSTGSPGSSPSASTGTGPGTPGSGTASSSPGSSTP | |
| | SGATGSPGSSTPSGATGSPGASPGTSSTGSPGGKPGR | |
| Seg 95 | AGGKPGGASPGTSSTGSPGSSPSASTGTGPGSSPSASTGTGPGTPGSGTASSSPGSS | 287 |
| | TPSGATGSPGSSPSASTGTGPGASPGTSSTGSPGTPGSGTASSSPGSSTPSGATGSPG | |
| | TPGSGTASSSPGASGGKPGPGTSSTGSPGASPGTSSTGSPGTPGSGTASSSPGSSTPS | |
| | GATGSPGASPGTSSTGSPGTPGSGTASSSPGSSTPSGATGSPGSSPSASTGTGPGSSP | |
| | SASTGTGPGSSTPSGATGSPGSSTPSGGGKPGATGSPGASPGTSSTGSPGASPGTSS | |
| | TGSPGASPGTSSTGSPGTPGSGTASSSPGASPGTSSTGSPGASPGTSSTGSPGASPGT | |
| | SSTGSPGSSPSASTGTGPGTPGSGTASSSPGASPGTSSTGGGKPGSPGASPGTSSTGS | |
| | PGASPGTSSTGSPGSSTPSGATGSPGSSTPSGATGSPGASPGTSSTGSPGTPGSGTAS | |
| | SSPGSSTPSGATGSPGSSTPSGATGSPGSSTPSGATGSPGSSPSASTGTGPGAGGKP | |
| | GSPGTSSTGSPGASPGTSSTGSPGTPGSGTASSSPGASPGTSSTGSPGASPGTSSTGS | |
| | PGASPGTSSTGSPGASPGTSSTGSPGTPGSGTASSSPGSSTPSGATGSPGTPGSGTAS | |
| | SSPGSSTPGGKPGSGATGSPGTPGSGTASSSPGSSTPSGATGSPGSSTPSGATGSPGS | |
| | SPSASTGTGPGSSPSASTGTGPGASPGTSSTGSPGTPGSGTASSSPGSSTPSGATGSP | |
| | GSSPSASTGTGPGSSPSASTGGGKPGTGPGASPGTSSTGSPGASPGTSSTGSPGSSTP | |
| | SGATGSPGSSPSASTGTGPGASPGTSSTGSPGSSPSASTGTGPGTPGSGTASSSPGSS | |
| | TPSGATGSPGSSTPSGATGSPGASPGTSSTGSPGGKPGR | |
| Seg 96 | AGGKPGGASPGTSSTGSPGSSPSASTGTGPGSSPSASTGTGPGTPGSGTASSSPGSS | 288 |
| | TPSGATGSPGSSPSASTGTGPGASPGTSSTGSPGTPGSGTASSSPGSSTPSGATGSPG | |
| | TPGSGTASSSPGASPGTSSTGSPGASPGTSSTGSPGTPGSGTASSSPGSSTPSGATGS | |
| | PGASPGTSSTGSPGTPGSGTASSSPGSSTPSGATGSPGSSPSASTGTGPGSSPSASTG | |
| | TGPGSSTPSGATGSPGSSTPSGATGSPGASPGTSSTGSPGASPGTSSTGSPGASPGTS | |
| | STGSPGTPGSGTASSSPGASPGTSSTGSPGASPGTSSTGSPGASPGTSSTGSPGSSPS | |
| | ASTGTGPGTPGSGTASSSPGASPGTSSTGSPGASPGTSSTGSPGASPGTSSTGSPGSS | |
| | TPSGATGSPGSSTPSGATGSPGASPGTSSTGSPGTPGSGTASSSPGSSTPSGATGSPG | |
| | SSTPSGATGSPGSSTPSGATGSPGSSPSASTGTGPGASPGTSSTGSPGASPGTSSTGS | |
| | PGTPGSGTASSSPGASPGTSSTGSPGASPGTSSTGSPGASPGTSSTGSPGASPGTSST | |
| | GSPGTPGSGTASSSPGSSTPSGATGSPGTPGSGTASSSPGSSTPSGATGSPGTPGSGT | |
| | ASSSPGSSTPSGATGSPGSSTPSGATGSPGSSPSASTGTGPGSSPSASTGTGPGASPG | |
| | TSSTGSPGTPGSGTASSSPGSSTPSGATGSPGSSPSASTGTGPGSSPSASTGTGPGAS | |
| | PGTSSTGSPGASPGTSSTGSPGSSTPSGATGSPGSSPSASTGTGPGASPGTSSTGSPG | |
| | SSPSASTGTGPGTPGSGTASSSPGSSTPSGATGSPGSSTPSGATGSPGASPGTSSTGS | |
| | PR | |
| Seg 97 | AGASPGTSSTGSPGSSPSASTGTGPGSSPSASTGTGPGTPGSGTASSSPGSSTPSGAT | 289 |
| | GSPGSSPSASTGTGPGASPGTSSTGSPGTPGSGTASSSPGSSTPSGATGSPGTPGSGT | |
| | ASSSPGASPGTSSTGSPGASPGTSSTGSPGTPGSGTASSSPGSSTPSGATGSPGASPG | |
| | TSSTGSPGTPGSGTASSSPGSSTPSGATGSPGSSPSASTGTGPGSSPSASTGTGPGSS | |
| | TPSGATGSPGSSTPSGATGSPGASPGTSSTGSPGASPGTSSTGSPGASPGTSSTGSPG | |
| | TPGSGTASSSPGASPGTSSTGSPGASPGTSSTGSPGASPGTSSTGSPGSSPSASTGTG | |
| | PGTPGSGTASSSPGASPGTSSTGSPGASPGTSSTGSPGASPGTSSTGSPGSSTPSGAT | |
| | GSPGSSTPSGATGSPGASPGTSSTGSPGTPGSGTASSSPGSSTPSGATGSPGSSTPSG | |
| | ATGSPGSSTPSGATGSPGSSPSASTGTGPGASPGTSSTGSPGASPGTSSTGSPGTPGS | |
| | GTASSSPGASPGTSSTGSPGASPGTSSTGSPGASPGTSSTGSPGASPGTSSTGSPGTP | |
| | GSGTASSSPGSSTPSGATGSPGTPGSGTASSSPGSSTPSGATGSPGTPGSGTASSSPG | |
| | SSTPSGATGSPGSSTPSGATGSPGSSPSASTGTGPGSSPSASTGTGPGASPGTSSTGS | |
| | PGTPGSGTASSSPGSSTPSGATGSPGSSPSASTGTGPGSSPSASTGTGPGASPGTSST | |
| | GSPGASPGTSSTGSPGSSTPSGATGSPGSSPSASTGTGPGASPGTSSTGSPGSSPSAS | |
| | TGTGPGTPGSGTASSSPGSSTPSGATGSPGSSTPSGATGSPGASPGTSSTGSPGGKP | |
| | GR | |
| Seg 98 | AGGKPGGASPGTSSTGSPGSSPSASTGTGPGSSPSASTGTGPGTPGSGTASSSPGSS | 290 |
| | TPSGATGSPGSSPSASTGTGPGASPGTSSTGSPGTPGSGTASSSPGSSTPSGATGSPG | |
| | TPGSGTASSSPGASPGTSSTGSPGASPGTSSTGSPGTPGSGTASSSPGSSTPSGATGS | |
| | PGASPGTSSTGSPGTPGSGTASSSPGSSTPSGATGSPGSSPSASTGTGPGSSPSASTG | |
| | TGPGSSTPSGATGSPGSSTPSGATGSPGASPGTSSTGSPGASPGTSSTGSPGASPGTS | |
| | STGSPGTPGSGTASSSPGASPGTSSTGSPGASPGTSSTGSPGASPGTSSTGSPGSSPS | |
| | ASTGTGPGTPGSGTASSSPGASPGTSSTGSPGASPGTSSTGSPGASPGTSSTGSPGSS | |
| | TPSGATGSPGSSTPSGATGSPGASPGTSSTGSPGGKPGGTPGSGTASSSPGSSTPSG | |
| | ATGSPGSSTPSGATGSPGSSTPSGATGSPGSSPSASTGTGPGASPGTSSTGSPGASPG | |
| | TSSTGSPGTPGSGTASSSPGASPGTSSTGSPGASPGTSSTGSPGASPGTSSTGSPGAS | |
| | PGTSSTGSPGTPGSGTASSSPGSSTPSGATGSPGTPGSGTASSSPGSSTPSGATGSPG | |
| | TPGSGTASSSPGSSTPSGATGSPGSSTPSGATGSPGSSPSASTGTGPGSSPSASTGTG | |
| | PGASPGTSSTGSPGTPGSGTASSSPGSSTPSGATGSPGSSPSASTGTGPGSSPSASTG | |
| | TGPGASPGTSSTGSPGASPGTSSTGSPGSSTPSGATGSPGSSPSASTGTGPGASPGTS | |
| | STGSPGSSPSASTGTGPGTPGSGTASSSPGSSTPSGATGSPGSSTPSGATGSPGASPG | |
| | TSSTGSPR | |
| Seg 99 | AGASPGTSSTGSPGSSPSASTGTGPGSSPSASTGTGPGTPGSGTASSSPGSSTPSGAT | 291 |
| | GSPGSSPSASTGTGPGASPGTSSTGSPGTPGSGTASSSPGSSTPSGATGSPGTPGSGT | |
| | ASSSPGASPGTSSTGSPGASPGTSSTGSPGTPGSGTASSSPGSSTPSGATGSPGASPG | |
| | TSSTGSPGTPGSGTASSSPGSSTPSGATGSPGSSPSASTGTGPGSSPSASTGTGPGSS | |
| | TPSGATGSPGSSTPSGATGSPGASPGTSSTGSPGASPGTSSTGSPGASPGTSSTGSPG | |
| | TPGSGTASSSPGASPGTSSTGSPGASPGTSSTGSPGASPGTSSTGSPGSSPSASTGTG | |
| | PGTPGSGTASSSPGASPGTSSTGSPGASPGTSSTGSPGASPGTSSTGSPGSSTGGKPG | |
| | PSGATGSPGSSTPSGATGSPGASPGTSSTGSPGTPGSGTASSSPGSSTPSGGKPGGA | |
| | TGSPGSSTPSGATGSPGSSTPSGATGSPGSSPSASTGTGPGASPGTSSTGSPGASPGT | |
| | SSTGSPGTPGSGTASSSPGASPGTSSTGSPGASPGTSSTGSPGASPGTSSTGSPGASP | |
| | GTSSTGSPGTPGSGTASSSPGSSTPSGATGSPGTPGSGTASSSPGSSTPSGATGSPGT | |
| | PGSGTASSSPGSSTPSGATGSPGSSTPSGATGSPGSSPSASTGTGPGSSPSASTGTGP | |
| | GASPGTSSTGSPGTPGSGTASSSPGSSTPSGATGSPGSSPSASTGTGPGSSPSASTGT | |
| | GPGASPGTSSTGSPGASPGTSSTGSPGSSTPSGATGSPGSSPSASTGTGPGASPGTSS | |
| | TGSPGSSPSASTGTGPGTPGSGTASSSPGSSTPSGATGSPGSSTPSGATGSPGASPGT | |
| | SSTGSPR | |
| Seg 100 | AGASPGTSSTGSPGSSPSASTGTGPGSSPSASTGTGPGTPGSGTASSSPGSSTPSGAT | 292 |
| | GSPGSSPSASTGTGPGASPGTSSTGSPGTPGSGTASSSPGSSTPSGATGSPGTPGSGT | |
| | ASSSPGASPGTSSTGSPGASPGTSSTGSPGTPGSGTASSSPGSSTPSGATGSPGASPG | |
| | TSSTGSPGTPGSGTASSSPGSSTPSGATGSPGSSPSASTGTGPGSSPSASTGTGPGSS | |
| | TPSGATGSPGSSTPSGATGSPGASPGTSSTGSPGASPGTSSTGSPGASPGTSSTGSPG | |
| | TPGSGTASSSPGASPGTSSTGSPGASPGTSSTGSPGASPGTSSTGSPGSSPSASTGTG | |
| | PGTPGSGTASSSPGASPGTSSTGSPGASPGTSSTGSPGASPGTSSTGSPGSSTPSGAT | |
| | GSPGSSTPSGATGSPGASPGTSSTGSPGGKPGGTPGSGTASSSPGSSTPSGATGSPG | |
| | SSTPSGATGSPGSSTPSGATGSPGSSPSASTGTGPGASPGTSSTGSPGASPGTSSTGS | |
| | PGTPGSGTASSSPGASPGTSSTGSPGASPGTSSTGSPGASPGTSSTGSPGASPGTSST | |
| | GSPGTPGSGTASSSPGSSTPSGATGSPGTPGSGTASSSPGSSTPSGATGSPGTPGSGT | |
| | ASSSPGSSTPSGATGSPGSSTPSGATGSPGSSPSASTGTGPGSSPSASTGTGPGASPG | |
| | TSSTGSPGTPGSGTASSSPGSSTPSGATGSPGSSPSASTGTGPGSSPSASTGTGPGAS | |
| | PGTSSTGSPGASPGTSSTGSPGSSTPSGATGSPGSSPSASTGTGPGASPGTSSTGSPG | |
| | SSPSASTGTGPGTPGSGTASSSPGSSTPSGATGSPGSSTPSGATGSPGASPGTSSTGS | |
| | PGGKPGR | |
| Seg 101 | AEATTAAGGAGASPGTSSTGSPGSSPSASTGTGPGSSPSASTGTGPGTPGSGTASSS | 293 |
| | PGSSTPSGATGSPGSSPSASTGTGPGASPGTSSTGSPGTPGSGTASSSPGSSTPSGAT | |
| | GSPGTPGSGTASSSPGASPGTSSTGSPGASPGTSSTGSPGTPGSGTASSSPGSSTPSG | |
| | ATGSPGASPGTSSTGSPGTPGSGTASSSPGSSTPSGATGSPGSSPSASTGTGPGSSPS | |
| | ASTGTGPGSSTPSGATGSPGSSTPSGATGSPGASPGTSSTGSPGASPGTSSTGSPGA | |
| | SPGTSSTGSPGTPGSGTASSSPGASPGTSSTGSPGASPGTSSTGSPGASPGTSSTGSP | |
| | GSSPSASTGTGPGTPGSGTASSSPGASPGTSSTGSPGASPGTSSTGSPGASPGTSSTG | |
| | SPGSSTPSGATGSPGSSTPSGATGSPGASPGTSSTGSPTAEAAGCGTAEAAGTPGSG | |
| | TASSSPGSSTPSGATGSPGSSTPSGATGSPGSSTPSGATGSPGSSPSASTGTGPGASP | |
| | GTSSTGSPGASPGTSSTGSPGTPGSGTASSSPGASPGTSSTGSPGASPGTSSTGSPGA | |
| | SPGTSSTGSPGASPGTSSTGSPGTPGSGTASSSPGSSTPSGATGSPGTPGSGTASSSP | |
| | GSSTPSGATGSPGTPGSGTASSSPGSSTPSGATGSPGSSTPSGATGSPGSSPSASTGT | |
| | GPGSSPSASTGTGPGASPGTSSTGSPGTPGSGTASSSPGSSTPSGATGSPGSSPSAST | |
| | GTGPGSSPSASTGTGPGASPGTSSTGSPGASPGTSSTGSPGSSTPSGATGSPGSSPSA | |
| | STGTGPGASPGTSSTGSPGSSPSASTGTGPGTPGSGTASSSPGSSTPSGATGSPGSST | |
| | PSGATGSPGASPGTSSTGSPR | |
| Seg 102 | AEATTAAGGATAEAAGCGTAEAAGASPGTSSTGSPGSSPSASTGTGPGSSPSASTG | 294 |
| | TGPGTPGSGTASSSPGSSTPSGATGSPGSSPSASTGTGPGASPGTSSTGSPGTPGSGT | |
| | ASSSPGSSTPSGATGSPGTPGSGTASSSPGASPGTSSTGSPGASPGTSSTGSPGTPGS | |
| | GTASSSPGSSTPSGATGSPGASPGTSSTGSPGTPGSGTASSSPGSSTPSGATGSPGSS | |
| | PSASTGTGPGSSPSASTGTGPGSSTPSGATGSPGSSTPSGATGSPGASPGTSSTGSPG | |
| | ASPGTSSTGSPGASPGTSSTGSPGTPGSGTASSSPGASPGTSSTGSPGASPGTSSTGS | |
| | PGASPGTSSTGSPGSSPSASTGTGPGTPGSGTASSSPGASPGTSSTGSPGASPGTSST | |
| | GSPGASPGTSSTGSPGSSTPSGATGSPGSSTPSGATGSPGASPGTSSTGSPGTPGSGT | |
| | ASSSPGSSTPSGATGSPGSSTPSGATGSPGSSTPSGATGSPGSSPSASTGTGPGASPG | |
| | TSSTGSPGASPGTSSTGSPGTPGSGTASSSPGASPGTSSTGSPGASPGTSSTGSPGAS | |
| | PGTSSTGSPGASPGTSSTGSPGTPGSGTASSSPGSSTPSGATGSPGTPGSGTASSSPG | |
| | SSTPSGATGSPGTPGSGTASSSPGSSTPSGATGSPGSSTPSGATGSPGSSPSASTGTG | |
| | PGSSPSASTGTGPGASPGTSSTGSPGTPGSGTASSSPGSSTPSGATGSPGSSPSASTG | |
| | TGPGSSPSASTGTGPGASPGTSSTGSPGASPGTSSTGSPGSSTPSGATGSPGSSPSAS | |
| | TGTGPGASPGTSSTGSPGSSPSASTGTGPGTPGSGTASSSPGSSTPSGATGSPGSSTP | |
| | SGATGSPGASPGTSSTGSPTAEAAGCGTAEAAR | |
| Seg 103 | AEATTAAGGATAEAAGCGTAEAAGASPGTSSTGSPGSSPSASTGTGPGSSPSASTG | 295 |
| | TGPGTPGSGTASSSPGSSTPSGATGSPGSSPSASTGTGPGASPGTSSTGSPGTPGSGT | |
| | ASSSPGSSTPSGATGSPGTPGSGTASSSPGASPGTSSTGSPGASPGTSSTGSPGTPGS | |
| | GTASSSPGSSTPSGATGSPGASPGTSSTGSPGTPGSGTASSSPGSSTPSGATGSPGSS | |
| | PSASTGTGPGSSPSASTGTGPGSSTPSGATGSPGSSTPSGATGSPGASPGTSSTGSPG | |
| | ASPGTSSTGSPGASPGTSSTGSPGTPGSGTASSSPGASPGTSSTGSPGASPGTSSTGS | |
| | PGASPGTSSTGSPGSSPSASTGTGPGTPGSGTASSSPGASPGTSSTGSPGASPGTSST | |
| | GSPGASPGTSSTGSPGSSTPSGATGSPGSSTPSGATGSPGASPGTSSTGSPTAEAAG | |
| | CGTAEAAGTPGSGTASSSPGSSTPSGATGSPGSSTPSGATGSPGSSTPSGATGSPGS | |
| | SPSASTGTGPGASPGTSSTGSPGASPGTSSTGSPGTPGSGTASSSPGASPGTSSTGSP | |
| | GASPGTSSTGSPGASPGTSSTGSPGASPGTSSTGSPGTPGSGTASSSPGSSTPSGATG | |
| | SPGTPGSGTASSSPGSSTPSGATGSPGTPGSGTASSSPGSSTPSGATGSPGSSTPSGA | |
| | TGSPGSSPSASTGTGPGSSPSASTGTGPGASPGTSSTGSPGTPGSGTASSSPGSSTPS | |
| | GATGSPGSSPSASTGTGPGSSPSASTGTGPGASPGTSSTGSPGASPGTSSTGSPGSST | |
| | PSGATGSPGSSPSASTGTGPGASPGTSSTGSPGSSPSASTGTGPGTPGSGTASSSPGS | |
| | STPSGATGSPGSSTPSGATGSPGASPGTSSTGSPTAEAAGCGTAEAAR | |
| Seg 104 | AEATTAAGGATAEAAGCGTAEAAGASPGTSSTGSPGSSPSASTGTGPGSSPSASTG | 296 |
| | TGPGTPGSGTASSSPGSSTPSGATGSPGSSPSASTGTGPGASPGTSSTGSPGTPGSGT | |
| | ASSSPGSSTPSGATGSPGTPGSGTASSSPGASPGTSSTGSPGASPGTSSTGSPGTPGS | |
| | GTASSSPGSSTPSGATGSPGASPGTSSTGSPGTPGSGTASSSPGSSTPSGATGSPGSS | |
| | PSASTGTGPGSSPSASTGTGPGSSTPSGATGSPGSSTPSGATGSPGASPGTSSTGSPG | |
| | ASPGTSSTGSPGASPGTSSTGSPTAEAAGCGTAEAAGTPGSGTASSSPGASPGTSST | |
| | GSPGASPGTSSTGSPGASPGTSSTGSPGSSPSASTGTGPGTPGSGTASSSPGASPGTS | |
| | STGSPGASPGTSSTGSPGASPGTSSTGSPGSSTPSGATGSPGSSTPSGATGSPGASPG | |
| | TSSTGSPGTPGSGTASSSPGSSTPSGATGSPGSSTPSGATGSPGSSTPSGATGSPGSS | |
| | PSASTGTGPGASPGTSSTGSPGASPGTSSTGSPGTPGSGTASSSPGASPGTSSTGSPG | |
| | ASPGTSSTGSPGASPGTSSTGSPGASPGTSSTGSPTAEAAGCGTAEAAGTPGSGTA | |
| | SSSPGSSTPSGATGSPGTPGSGTASSSPGSSTPSGATGSPGTPGSGTASSSPGSSTPS | |
| | GATGSPGSSTPSGATGSPGSSPSASTGTGPGSSPSASTGTGPGASPGTSSTGSPGTP | |
| | GSGTASSSPGSSTPSGATGSPGSSPSASTGTGPGSSPSASTGTGPGASPGTSSTGSPG | |
| | ASPGTSSTGSPGSSTPSGATGSPGSSPSASTGTGPGASPGTSSTGSPGSSPSASTGTG | |
| | PGTPGSGTASSSPGSSTPSGATGSPGSSTPSGATGSPGASPGTSSTGSPTAEAAGCG | |
| | TAEAAR | |
| Seg 105 | ATGTATSEGSPEGASPGTSSTGSPGSSPSASTGTGPGSSPSASTGTGPGTPGSGTAS | 297 |
| | SSPGSSTPSGATGSPGSSPSASTGTGPGASPGTSSTGSPGTPGSGTASSSPGSSTPSG | |
| | ATGSPGTPGSGTASSSPGASPGTSSTGSPGASPGTSSTGSPGTPGSGTASSSPGSSTP | |
| | SGATGSPGASPGTSSTGSPGTPGSGTASSSPGSSTPSGATGSPGSSPSASTGTGPGSS | |
| | PSASTGTGPGSSTPSGATGSPGSSTPSGATGSPGASPGTSSTGSPGASPGTSSTGSPG | |
| | ASPGTSSTGSPGTPGSGTASSSPGASPGTSSTGSPGASPGTSSTGSPGASPGTSSTGS | |
| | PGSSPSASTGTGPGTPGSGTASSSPGASPGTSSTGSPGASPGTSSTGSPGASPGTSST | |
| | GSPGSSTPSGATGSPGSSTPSGATGSPGASPGTSSTGSPTAEAAGCGTAEAAGTPGS | |
| | GTASSSPGSSTPSGATGSPGSSTPSGATGSPGSSTPSGATGSPGSSPSASTGTGPGAS | |
| | PGTSSTGSPGASPGTSSTGSPGTPGSGTASSSPGASPGTSSTGSPGASPGTSSTGSPG | |
| | ASPGTSSTGSPGASPGTSSTGSPGTPGSGTASSSPGSSTPSGATGSPGTPGSGTASSS | |
| | PGSSTPSGATGSPGTPGSGTASSSPGSSTPSGATGSPGSSTPSGATGSPGSSPSASTG | |
| | TGPGSSPSASTGTGPGASPGTSSTGSPGTPGSGTASSSPGSSTPSGATGSPGSSPSAS | |
| | TGTGPGSSPSASTGTGPGASPGTSSTGSPGASPGTSSTGSPGSSTPSGATGSPGSSPS | |
| | ASTGTGPGASPGTSSTGSPGSSPSASTGTGPGTPGSGTASSSPGSSTPSGATGSPGSS | |
| | TPSGATGSPGASPGTSSTGSPR | |
| Seg 106 | ATGTATSEGSPETAEAAGCGTAEAAGASPGTSSTGSPGSSPSASTGTGPGSSPSAST | 298 |
| | GTGPGTPGSGTASSSPGSSTPSGATGSPGSSPSASTGTGPGASPGTSSTGSPGTPGS | |
| | GTASSSPGSSTPSGATGSPGTPGSGTASSSPGASPGTSSTGSPGASPGTSSTGSPGTP | |
| | GSGTASSSPGSSTPSGATGSPGASPGTSSTGSPGTPGSGTASSSPGSSTPSGATGSPG | |
| | SSPSASTGTGPGSSPSASTGTGPGSSTPSGATGSPGSSTPSGATGSPGASPGTSSTGS | |
| | PGASPGTSSTGSPGASPGTSSTGSPGTPGSGTASSSPGASPGTSSTGSPGASPGTSST | |
| | GSPGASPGTSSTGSPGSSPSASTGTGPGTPGSGTASSSPGASPGTSSTGSPGASPGTS | |
| | STGSPGASPGTSSTGSPGSSTPSGATGSPGSSTPSGATGSPGASPGTSSTGSPGTPGS | |
| | GTASSSPGSSTPSGATGSPGSSTPSGATGSPGSSTPSGATGSPGSSPSASTGTGPGAS | |
| | PGTSSTGSPGASPGTSSTGSPGTPGSGTASSSPGASPGTSSTGSPGASPGTSSTGSPG | |
| | ASPGTSSTGSPGASPGTSSTGSPGTPGSGTASSSPGSSTPSGATGSPGTPGSGTASSS | |
| | PGSSTPSGATGSPGTPGSGTASSSPGSSTPSGATGSPGSSTPSGATGSPGSSPSASTG | |
| | TGPGSSPSASTGTGPGASPGTSSTGSPGTPGSGTASSSPGSSTPSGATGSPGSSPSAS | |
| | TGTGPGSSPSASTGTGPGASPGTSSTGSPGASPGTSSTGSPGSSTPSGATGSPGSSPS | |
| | ASTGTGPGASPGTSSTGSPGSSPSASTGTGPGTPGSGTASSSPGSSTPSGATGSPGSS | |
| | TPSGATGSPGASPGTSSTGSPTAEAAGCGTAEAAR | |
| Seg 107 | ATGTATSEGSPETAEAAGCGTAEAAGASPGTSSTGSPGSSPSASTGTGPGSSPSAST | 299 |
| | GTGPGTPGSGTASSSPGSSTPSGATGSPGSSPSASTGTGPGASPGTSSTGSPGTPGS | |
| | GTASSSPGSSTPSGATGSPGTPGSGTASSSPGASPGTSSTGSPGASPGTSSTGSPGTP | |
| | GSGTASSSPGSSTPSGATGSPGASPGTSSTGSPGTPGSGTASSSPGSSTPSGATGSPG | |
| | SSPSASTGTGPGSSPSASTGTGPGSSTPSGATGSPGSSTPSGATGSPGASPGTSSTGS | |
| | PGASPGTSSTGSPGASPGTSSTGSPGTPGSGTASSSPGASPGTSSTGSPGASPGTSST | |
| | GSPGASPGTSSTGSPGSSPSASTGTGPGTPGSGTASSSPGASPGTSSTGSPGASPGTS | |
| | STGSPGASPGTSSTGSPGSSTPSGATGSPGSSTPSGATGSPGASPGTSSTGSPTAEAA | |
| | GCGTAEAAGTPGSGTASSSPGSSTPSGATGSPGSSTPSGATGSPGSSTPSGATGSPG | |
| | SSPSASTGTGPGASPGTSSTGSPGASPGTSSTGSPGTPGSGTASSSPGASPGTSSTGS | |
| | PGASPGTSSTGSPGASPGTSSTGSPGASPGTSSTGSPGTPGSGTASSSPGSSTPSGAT | |
| | GSPGTPGSGTASSSPGSSTPSGATGSPGTPGSGTASSSPGSSTPSGATGSPGSSTPSG | |
| | ATGSPGSSPSASTGTGPGSSPSASTGTGPGASPGTSSTGSPGTPGSGTASSSPGSSTP | |
| | SGATGSPGSSPSASTGTGPGSSPSASTGTGPGASPGTSSTGSPGASPGTSSTGSPGSS | |
| | TPSGATGSPGSSPSASTGTGPGASPGTSSTGSPGSSPSASTGTGPGTPGSGTASSSPG | |
| | SSTPSGATGSPGSSTPSGATGSPGASPGTSSTGSPTAEAAGCGTAEAAR | |
| Seg 108 | ATGTATSEGSPETAEAAGCGTAEAAGASPGTSSTGSPGSSPSASTGTGPGSSPSAST | 300 |
| | GTGPGTPGSGTASSSPGSSTPSGATGSPGSSPSASTGTGPGASPGTSSTGSPGTPGS | |
| | GTASSSPGSSTPSGATGSPGTPGSGTASSSPGASPGTSSTGSPGASPGTSSTGSPGTP | |
| | GSGTASSSPGSSTPSGATGSPGASPGTSSTGSPGTPGSGTASSSPGSSTPSGATGSPG | |
| | SSPSASTGTGPGSSPSASTGTGPGSSTPSGATGSPGSSTPSGATGSPGASPGTSSTGS | |
| | PGASPGTSSTGSPGASPGTSSTGSPTAEAAGCGTAEAAGTPGSGTASSSPGASPGTS | |
| | STGSPGASPGTSSTGSPGASPGTSSTGSPGSSPSASTGTGPGTPGSGTASSSPGASPG | |
| | TSSTGSPGASPGTSSTGSPGASPGTSSTGSPGSSTPSGATGSPGSSTPSGATGSPGAS | |
| | PGTSSTGSPGTPGSGTASSSPGSSTPSGATGSPGSSTPSGATGSPGSSTPSGATGSPG | |
| | SSPSASTGTGPGASPGTSSTGSPGASPGTSSTGSPGTPGSGTASSSPGASPGTSSTGS | |
| | PGASPGTSSTGSPGASPGTSSTGSPGASPGTSSTGSPTAEAAGCGTAEAAGTPGSG | |
| | TASSSPGSSTPSGATGSPGTPGSGTASSSPGSSTPSGATGSPGTPGSGTASSSPGSST | |
| | PSGATGSPGSSTPSGATGSPGSSPSASTGTGPGSSPSASTGTGPGASPGTSSTGSPGT | |
| | PGSGTASSSPGSSTPSGATGSPGSSPSASTGTGPGSSPSASTGTGPGASPGTSSTGSP | |
| | GASPGTSSTGSPGSSTPSGATGSPGSSPSASTGTGPGASPGTSSTGSPGSSPSASTGT | |
| | GPGTPGSGTASSSPGSSTPSGATGSPGSSTPSGATGSPGASPGTSSTGSPTAEAAGC | |
| | GTAEAAR | |
| Seg 109 | EPTAATTGESAGGASPGTSSTGSPGSSPSASTGTGPGSSPSASTGTGPGTPGSGTAS | 301 |
| | SSPGSSTPSGATGSPGSSPSASTGTGPGASPGTSSTGSPGTPGSGTASSSPGSSTPSG | |
| | ATGSPGTPGSGTASSSPGASPGTSSTGSPGASPGTSSTGSPGTPGSGTASSSPGSSTP | |
| | SGATGSPGASPGTSSTGSPGTPGSGTASSSPGSSTPSGATGSPGSSPSASTGTGPGSS | |
| | PSASTGTGPGSSTPSGATGSPGSSTPSGATGSPGASPGTSSTGSPGASPGTSSTGSPG | |
| | ASPGTSSTGSPGTPGSGTASSSPGASPGTSSTGSPGASPGTSSTGSPGASPGTSSTGS | |
| | PGSSPSASTGTGPGTPGSGTASSSPGASPGTSSTGSPGASPGTSSTGSPGASPGTSST | |
| | GSPGSSTPSGATGSPGSSTPSGATGSPGASPGTSSTGSPTAEAAGCGTAEAAGTPGS | |
| | GTASSSPGSSTPSGATGSPGSSTPSGATGSPGSSTPSGATGSPGSSPSASTGTGPGAS | |
| | PGTSSTGSPGASPGTSSTGSPGTPGSGTASSSPGASPGTSSTGSPGASPGTSSTGSPG | |
| | ASPGTSSTGSPGASPGTSSTGSPGTPGSGTASSSPGSSTPSGATGSPGTPGSGTASSS | |
| | PGSSTPSGATGSPGTPGSGTASSSPGSSTPSGATGSPGSSTPSGATGSPGSSPSASTG | |
| | TGPGSSPSASTGTGPGASPGTSSTGSPGTPGSGTASSSPGSSTPSGATGSPGSSPSAS | |
| | TGTGPGSSPSASTGTGPGASPGTSSTGSPGASPGTSSTGSPGSSTPSGATGSPGSSPS | |
| | ASTGTGPGASPGTSSTGSPGSSPSASTGTGPGTPGSGTASSSPGSSTPSGATGSPGSS | |
| | TPSGATGSPGASPGTSSTGSPR | |
| Seg 110 | EPTAATTGESAGTAEAAGCGTAEAAGASPGTSSTGSPGSSPSASTGTGPGSSPSAS | 302 |
| | TGTGPGTPGSGTASSSPGSSTPSGATGSPGSSPSASTGTGPGASPGTSSTGSPGTPGS | |
| | GTASSSPGSSTPSGATGSPGTPGSGTASSSPGASPGTSSTGSPGASPGTSSTGSPGTP | |
| | GSGTASSSPGSSTPSGATGSPGASPGTSSTGSPGTPGSGTASSSPGSSTPSGATGSPG | |
| | SSPSASTGTGPGSSPSASTGTGPGSSTPSGATGSPGSSTPSGATGSPGASPGTSSTGS | |
| | PGASPGTSSTGSPGASPGTSSTGSPGTPGSGTASSSPGASPGTSSTGSPGASPGTSST | |
| | GSPGASPGTSSTGSPGSSPSASTGTGPGTPGSGTASSSPGASPGTSSTGSPGASPGTS | |
| | STGSPGASPGTSSTGSPGSSTPSGATGSPGSSTPSGATGSPGASPGTSSTGSPGTPGS | |
| | GTASSSPGSSTPSGATGSPGSSTPSGATGSPGSSTPSGATGSPGSSPSASTGTGPGAS | |
| | PGTSSTGSPGASPGTSSTGSPGTPGSGTASSSPGASPGTSSTGSPGASPGTSSTGSPG | |
| | ASPGTSSTGSPGASPGTSSTGSPGTPGSGTASSSPGSSTPSGATGSPGTPGSGTASSS | |
| | PGSSTPSGATGSPGTPGSGTASSSPGSSTPSGATGSPGSSTPSGATGSPGSSPSASTG | |
| | TGPGSSPSASTGTGPGASPGTSSTGSPGTPGSGTASSSPGSSTPSGATGSPGSSPSAS | |
| | TGTGPGSSPSASTGTGPGASPGTSSTGSPGASPGTSSTGSPGSSTPSGATGSPGSSPS | |
| | ASTGTGPGASPGTSSTGSPGSSPSASTGTGPGTPGSGTASSSPGSSTPSGATGSPGSS | |
| | TPSGATGSPGASPGTSSTGSPTAEAAGCGTAEAAR | |
| Seg 111 | EPTAATTGESAGTAEAAGCGTAEAAGASPGTSSTGSPGSSPSASTGTGPGSSPSAS | 303 |
| | TGTGPGTPGSGTASSSPGSSTPSGATGSPGSSPSASTGTGPGASPGTSSTGSPGTPGS | |
| | GTASSSPGSSTPSGATGSPGTPGSGTASSSPGASPGTSSTGSPGASPGTSSTGSPGTP | |
| | GSGTASSSPGSSTPSGATGSPGASPGTSSTGSPGTPGSGTASSSPGSSTPSGATGSPG | |
| | SSPSASTGTGPGSSPSASTGTGPGSSTPSGATGSPGSSTPSGATGSPGASPGTSSTGS | |
| | PGASPGTSSTGSPGASPGTSSTGSPGTPGSGTASSSPGASPGTSSTGSPGASPGTSST | |
| | GSPGASPGTSSTGSPGSSPSASTGTGPGTPGSGTASSSPGASPGTSSTGSPGASPGTS | |
| | STGSPGASPGTSSTGSPGSSTPSGATGSPGSSTPSGATGSPGASPGTSSTGSPTAEAA | |
| | GCGTAEAAGTPGSGTASSSPGSSTPSGATGSPGSSTPSGATGSPGSSTPSGATGSPG | |
| | SSPSASTGTGPGASPGTSSTGSPGASPGTSSTGSPGTPGSGTASSSPGASPGTSSTGS | |
| | PGASPGTSSTGSPGASPGTSSTGSPGASPGTSSTGSPGTPGSGTASSSPGSSTPSGAT | |
| | GSPGTPGSGTASSSPGSSTPSGATGSPGTPGSGTASSSPGSSTPSGATGSPGSSTPSG | |
| | ATGSPGSSPSASTGTGPGSSPSASTGTGPGASPGTSSTGSPGTPGSGTASSSPGSSTP | |
| | SGATGSPGSSPSASTGTGPGSSPSASTGTGPGASPGTSSTGSPGASPGTSSTGSPGSS | |
| | TPSGATGSPGSSPSASTGTGPGASPGTSSTGSPGSSPSASTGTGPGTPGSGTASSSPG | |
| | SSTPSGATGSPGSSTPSGATGSPGASPGTSSTGSPTAEAAGCGTAEAAR | |
| Seg 112 | EPTAATTGESAGTAEAAGCGTAEAAGASPGTSSTGSPGSSPSASTGTGPGSSPSAS | 304 |
| | TGTGPGTPGSGTASSSPGSSTPSGATGSPGSSPSASTGTGPGASPGTSSTGSPGTPGS | |
| | GTASSSPGSSTPSGATGSPGTPGSGTASSSPGASPGTSSTGSPGASPGTSSTGSPGTP | |
| | GSGTASSSPGSSTPSGATGSPGASPGTSSTGSPGTPGSGTASSSPGSSTPSGATGSPG | |
| | SSPSASTGTGPGSSPSASTGTGPGSSTPSGATGSPGSSTPSGATGSPGASPGTSSTGS | |
| | PGASPGTSSTGSPGASPGTSSTGSPTAEAAGCGTAEAAGTPGSGTASSSPGASPGTS | |
| | STGSPGASPGTSSTGSPGASPGTSSTGSPGSSPSASTGTGPGTPGSGTASSSPGASPG | |
| | TSSTGSPGASPGTSSTGSPGASPGTSSTGSPGSSTPSGATGSPGSSTPSGATGSPGAS | |
| | PGTSSTGSPGTPGSGTASSSPGSSTPSGATGSPGSSTPSGATGSPGSSTPSGATGSPG | |
| | SSPSASTGTGPGASPGTSSTGSPGASPGTSSTGSPGTPGSGTASSSPGASPGTSSTGS | |
| | PGASPGTSSTGSPGASPGTSSTGSPGASPGTSSTGSPTAEAAGCGTAEAAGTPGSG | |
| | TASSSPGSSTPSGATGSPGTPGSGTASSSPGSSTPSGATGSPGTPGSGTASSSPGSST | |
| | PSGATGSPGSSTPSGATGSPGSSPSASTGTGPGSSPSASTGTGPGASPGTSSTGSPGT | |
| | PGSGTASSSPGSSTPSGATGSPGSSPSASTGTGPGSSPSASTGTGPGASPGTSSTGSP | |
| | GASPGTSSTGSPGSSTPSGATGSPGSSPSASTGTGPGASPGTSSTGSPGSSPSASTGT | |
| | GPGTPGSGTASSSPGSSTPSGATGSPGSSTPSGATGSPGASPGTSSTGSPTAEAAGC | |
| | GTAEAAR | |
| Seg 113 | AEATTAAGGAEEEGASPGTSSTGSPGSSPSASTGTGPGSSPSASTGTGPGTPGSGT | 305 |
| | ASSSPGSSTPSGATGSPGSSPSASTGTGPGASPGTSSTGSPGTPGSGTASSSPGSSTP | |
| | SGATGSPGTPGSGTASSSPGASPGTSSTGSPGASPGTSSTGSPGTPGSGTASSSPGSS | |
| | TPSGATGSPGASPGTSSTGSPGTPGSGTASSSPGSSTPSGATGSPGSSPSASTGTGPG | |
| | SSPSASTGTGPGSSTPSGATGSPGSSTPSGATGSPGASPGTSSTGSPGASPGTSSTGS | |
| | PGASPGTSSTGSPGTPGSGTASSSPGASPGTSSTGSPGASPGTSSTGSPGASPGTSST | |
| | GSPGSSPSASTGTGPGTPGSGTASSSPGASPGTSSTGSPGASPGTSSTGSPGASPGTS | |
| | STGSPGSSTPSGATGSPGSSTPSGATGSPGASPGTSSTGSPTAEAAGCGTAEAAGTP | |
| | GSGTASSSPGSSTPSGATGSPGSSTPSGATGSPGSSTPSGATGSPGSSPSASTGTGPG | |
| | ASPGTSSTGSPGASPGTSSTGSPGTPGSGTASSSPGASPGTSSTGSPGASPGTSSTGS | |
| | PGASPGTSSTGSPGASPGTSSTGSPGTPGSGTASSSPGSSTPSGATGSPGTPGSGTAS | |
| | SSPGSSTPSGATGSPGTPGSGTASSSPGSSTPSGATGSPGSSTPSGATGSPGSSPSAS | |
| | TGTGPGSSPSASTGTGPGASPGTSSTGSPGTPGSGTASSSPGSSTPSGATGSPGSSPS | |
| | ASTGTGPGSSPSASTGTGPGASPGTSSTGSPGASPGTSSTGSPGSSTPSGATGSPGSS | |
| | PSASTGTGPGASPGTSSTGSPGSSPSASTGTGPGTPGSGTASSSPGSSTPSGATGSPG | |
| | SSTPSGATGSPGASPGTSSTGSPR | |
| Seg 114 | AEATTAAGGAEEETAEAAGCGTAEAAGASPGTSSTGSPGSSPSASTGTGPGSSPSA | 306 |
| | STGTGPGTPGSGTASSSPGSSTPSGATGSPGSSPSASTGTGPGASPGTSSTGSPGTPG | |
| | SGTASSSPGSSTPSGATGSPGTPGSGTASSSPGASPGTSSTGSPGASPGTSSTGSPGT | |
| | PGSGTASSSPGSSTPSGATGSPGASPGTSSTGSPGTPGSGTASSSPGSSTPSGATGSP | |
| | GSSPSASTGTGPGSSPSASTGTGPGSSTPSGATGSPGSSTPSGATGSPGASPGTSSTG | |
| | SPGASPGTSSTGSPGASPGTSSTGSPGTPGSGTASSSPGASPGTSSTGSPGASPGTSS | |
| | TGSPGASPGTSSTGSPGSSPSASTGTGPGTPGSGTASSSPGASPGTSSTGSPGASPGT | |
| | SSTGSPGASPGTSSTGSPGSSTPSGATGSPGSSTPSGATGSPGASPGTSSTGSPGTPG | |
| | SGTASSSPGSSTPSGATGSPGSSTPSGATGSPGSSTPSGATGSPGSSPSASTGTGPGA | |
| | SPGTSSTGSPGASPGTSSTGSPGTPGSGTASSSPGASPGTSSTGSPGASPGTSSTGSP | |
| | GASPGTSSTGSPGASPGTSSTGSPGTPGSGTASSSPGSSTPSGATGSPGTPGSGTASS | |
| | SPGSSTPSGATGSPGTPGSGTASSSPGSSTPSGATGSPGSSTPSGATGSPGSSPSAST | |
| | GTGPGSSPSASTGTGPGASPGTSSTGSPGTPGSGTASSSPGSSTPSGATGSPGSSPSA | |
| | STGTGPGSSPSASTGTGPGASPGTSSTGSPGASPGTSSTGSPGSSTPSGATGSPGSSP | |
| | SASTGTGPGASPGTSSTGSPGSSPSASTGTGPGTPGSGTASSSPGSSTPSGATGSPGS | |
| | STPSGATGSPGASPGTSSTGSPTAEAAGCGTAEAAR | |
| Seg 115 | AEATTAAGGAEEETAEAAGCGTAEAAGASPGTSSTGSPGSSPSASTGTGPGSSPSA | 307 |
| | STGTGPGTPGSGTASSSPGSSTPSGATGSPGSSPSASTGTGPGASPGTSSTGSPGTPG | |
| | SGTASSSPGSSTPSGATGSPGTPGSGTASSSPGASPGTSSTGSPGASPGTSSTGSPGT | |
| | PGSGTASSSPGSSTPSGATGSPGASPGTSSTGSPGTPGSGTASSSPGSSTPSGATGSP | |
| | GSSPSASTGTGPGSSPSASTGTGPGSSTPSGATGSPGSSTPSGATGSPGASPGTSSTG | |
| | SPGASPGTSSTGSPGASPGTSSTGSPGTPGSGTASSSPGASPGTSSTGSPGASPGTSS | |
| | TGSPGASPGTSSTGSPGSSPSASTGTGPGTPGSGTASSSPGASPGTSSTGSPGASPGT | |
| | SSTGSPGASPGTSSTGSPGSSTPSGATGSPGSSTPSGATGSPGASPGTSSTGSPTAEA | |
| | AGCGTAEAAGTPGSGTASSSPGSSTPSGATGSPGSSTPSGATGSPGSSTPSGATGSP | |
| | GSSPSASTGTGPGASPGTSSTGSPGASPGTSSTGSPGTPGSGTASSSPGASPGTSSTG | |
| | SPGASPGTSSTGSPGASPGTSSTGSPGASPGTSSTGSPGTPGSGTASSSPGSSTPSGA | |
| | TGSPGTPGSGTASSSPGSSTPSGATGSPGTPGSGTASSSPGSSTPSGATGSPGSSTPS | |
| | GATGSPGSSPSASTGTGPGSSPSASTGTGPGASPGTSSTGSPGTPGSGTASSSPGSST | |
| | PSGATGSPGSSPSASTGTGPGSSPSASTGTGPGASPGTSSTGSPGASPGTSSTGSPGS | |
| | STPSGATGSPGSSPSASTGTGPGASPGTSSTGSPGSSPSASTGTGPGTPGSGTASSSP | |
| | GSSTPSGATGSPGSSTPSGATGSPGASPGTSSTGSPTAEAAGCGTAEAAR | |
| Seg 116 | AEATTAAGGAEEETAEAAGCGTAEAAGASPGTSSTGSPGSSPSASTGTGPGSSPSA | 308 |
| | STGTGPGTPGSGTASSSPGSSTPSGATGSPGSSPSASTGTGPGASPGTSSTGSPGTPG | |
| | SGTASSSPGSSTPSGATGSPGTPGSGTASSSPGASPGTSSTGSPGASPGTSSTGSPGT | |
| | PGSGTASSSPGSSTPSGATGSPGASPGTSSTGSPGTPGSGTASSSPGSSTPSGATGSP | |
| | GSSPSASTGTGPGSSPSASTGTGPGSSTPSGATGSPGSSTPSGATGSPGASPGTSSTG | |
| | SPGASPGTSSTGSPGASPGTSSTGSPTAEAAGCGTAEAAGTPGSGTASSSPGASPGT | |
| | SSTGSPGASPGTSSTGSPGASPGTSSTGSPGSSPSASTGTGPGTPGSGTASSSPGASP | |
| | GTSSTGSPGASPGTSSTGSPGASPGTSSTGSPGSSTPSGATGSPGSSTPSGATGSPGA | |
| | SPGTSSTGSPGTPGSGTASSSPGSSTPSGATGSPGSSTPSGATGSPGSSTPSGATGSP | |
| | GSSPSASTGTGPGASPGTSSTGSPGASPGTSSTGSPGTPGSGTASSSPGASPGTSSTG | |
| | SPGASPGTSSTGSPGASPGTSSTGSPGASPGTSSTGSPTAEAAGCGTAEAAGTPGSG | |
| | TASSSPGSSTPSGATGSPGTPGSGTASSSPGSSTPSGATGSPGTPGSGTASSSPGSST | |
| | PSGATGSPGSSTPSGATGSPGSSPSASTGTGPGSSPSASTGTGPGASPGTSSTGSPGT | |
| | PGSGTASSSPGSSTPSGATGSPGSSPSASTGTGPGSSPSASTGTGPGASPGTSSTGSP | |
| | GASPGTSSTGSPGSSTPSGATGSPGSSPSASTGTGPGASPGTSSTGSPGSSPSASTGT | |
| | GPGTPGSGTASSSPGSSTPSGATGSPGSSTPSGATGSPGASPGTSSTGSPTAEAAGC | |
| | GTAEAAR | |
| Seg 117 | ATGTATSEGSPEEEEGASPGTSSTGSPGSSPSASTGTGPGSSPSASTGTGPGTPGSG | 309 |
| | TASSSPGSSTPSGATGSPGSSPSASTGTGPGASPGTSSTGSPGTPGSGTASSSPGSST | |
| | PSGATGSPGTPGSGTASSSPGASPGTSSTGSPGASPGTSSTGSPGTPGSGTASSSPGS | |
| | STPSGATGSPGASPGTSSTGSPGTPGSGTASSSPGSSTPSGATGSPGSSPSASTGTGP | |
| | GSSPSASTGTGPGSSTPSGATGSPGSSTPSGATGSPGASPGTSSTGSPGASPGTSSTG | |
| | SPGASPGTSSTGSPGTPGSGTASSSPGASPGTSSTGSPGASPGTSSTGSPGASPGTSS | |
| | TGSPGSSPSASTGTGPGTPGSGTASSSPGASPGTSSTGSPGASPGTSSTGSPGASPGT | |
| | SSTGSPGSSTPSGATGSPGSSTPSGATGSPGASPGTSSTGSPTAEAAGCGTAEAAGT | |
| | PGSGTASSSPGSSTPSGATGSPGSSTPSGATGSPGSSTPSGATGSPGSSPSASTGTGP | |
| | GASPGTSSTGSPGASPGTSSTGSPGTPGSGTASSSPGASPGTSSTGSPGASPGTSSTG | |
| | SPGASPGTSSTGSPGASPGTSSTGSPGTPGSGTASSSPGSSTPSGATGSPGTPGSGTA | |
| | SSSPGSSTPSGATGSPGTPGSGTASSSPGSSTPSGATGSPGSSTPSGATGSPGSSPSAS | |
| | TGTGPGSSPSASTGTGPGASPGTSSTGSPGTPGSGTASSSPGSSTPSGATGSPGSSPS | |
| | ASTGTGPGSSPSASTGTGPGASPGTSSTGSPGASPGTSSTGSPGSSTPSGATGSPGSS | |
| | PSASTGTGPGASPGTSSTGSPGSSPSASTGTGPGTPGSGTASSSPGSSTPSGATGSPG | |
| | SSTPSGATGSPGASPGTSSTGSPR | |
| Seg 118 | ATGTATSEGSPEEEETAEAAGCGTAEAAGASPGTSSTGSPGSSPSASTGTGPGSSPS | 310 |
| | ASTGTGPGTPGSGTASSSPGSSTPSGATGSPGSSPSASTGTGPGASPGTSSTGSPGTP | |
| | GSGTASSSPGSSTPSGATGSPGTPGSGTASSSPGASPGTSSTGSPGASPGTSSTGSPG | |
| | TPGSGTASSSPGSSTPSGATGSPGASPGTSSTGSPGTPGSGTASSSPGSSTPSGATGS | |
| | PGSSPSASTGTGPGSSPSASTGTGPGSSTPSGATGSPGSSTPSGATGSPGASPGTSST | |
| | GSPGASPGTSSTGSPGASPGTSSTGSPGTPGSGTASSSPGASPGTSSTGSPGASPGTS | |
| | STGSPGASPGTSSTGSPGSSPSASTGTGPGTPGSGTASSSPGASPGTSSTGSPGASPG | |
| | TSSTGSPGASPGTSSTGSPGSSTPSGATGSPGSSTPSGATGSPGASPGTSSTGSPGTP | |
| | GSGTASSSPGSSTPSGATGSPGSSTPSGATGSPGSSTPSGATGSPGSSPSASTGTGPG | |
| | ASPGTSSTGSPGASPGTSSTGSPGTPGSGTASSSPGASPGTSSTGSPGASPGTSSTGS | |
| | PGASPGTSSTGSPGASPGTSSTGSPGTPGSGTASSSPGSSTPSGATGSPGTPGSGTAS | |
| | SSPGSSTPSGATGSPGTPGSGTASSSPGSSTPSGATGSPGSSTPSGATGSPGSSPSAS | |
| | TGTGPGSSPSASTGTGPGASPGTSSTGSPGTPGSGTASSSPGSSTPSGATGSPGSSPS | |
| | ASTGTGPGSSPSASTGTGPGASPGTSSTGSPGASPGTSSTGSPGSSTPSGATGSPGSS | |
| | PSASTGTGPGASPGTSSTGSPGSSPSASTGTGPGTPGSGTASSSPGSSTPSGATGSPG | |
| | SSTPSGATGSPGASPGTSSTGSPTAEAAGCGTAEAAR | |
| Seg 119 | ATGTATSEGSPEEEETAEAAGCGTAEAAGASPGTSSTGSPGSSPSASTGTGPGSSPS | 311 |
| | ASTGTGPGTPGSGTASSSPGSSTPSGATGSPGSSPSASTGTGPGASPGTSSTGSPGTP | |
| | GSGTASSSPGSSTPSGATGSPGTPGSGTASSSPGASPGTSSTGSPGASPGTSSTGSPG | |
| | TPGSGTASSSPGSSTPSGATGSPGASPGTSSTGSPGTPGSGTASSSPGSSTPSGATGS | |
| | PGSSPSASTGTGPGSSPSASTGTGPGSSTPSGATGSPGSSTPSGATGSPGASPGTSST | |
| | GSPGASPGTSSTGSPGASPGTSSTGSPGTPGSGTASSSPGASPGTSSTGSPGASPGTS | |
| | STGSPGASPGTSSTGSPGSSPSASTGTGPGTPGSGTASSSPGASPGTSSTGSPGASPG | |
| | TSSTGSPGASPGTSSTGSPGSSTPSGATGSPGSSTPSGATGSPGASPGTSSTGSPTAE | |
| | AAGCGTAEAAGTPGSGTASSSPGSSTPSGATGSPGSSTPSGATGSPGSSTPSGATGS | |
| | PGSSPSASTGTGPGASPGTSSTGSPGASPGTSSTGSPGTPGSGTASSSPGASPGTSST | |
| | GSPGASPGTSSTGSPGASPGTSSTGSPGASPGTSSTGSPGTPGSGTASSSPGSSTPSG | |
| | ATGSPGTPGSGTASSSPGSSTPSGATGSPGTPGSGTASSSPGSSTPSGATGSPGSSTP | |
| | SGATGSPGSSPSASTGTGPGSSPSASTGTGPGASPGTSSTGSPGTPGSGTASSSPGSS | |
| | TPSGATGSPGSSPSASTGTGPGSSPSASTGTGPGASPGTSSTGSPGASPGTSSTGSPG | |
| | SSTPSGATGSPGSSPSASTGTGPGASPGTSSTGSPGSSPSASTGTGPGTPGSGTASSS | |
| | PGSSTPSGATGSPGSSTPSGATGSPGASPGTSSTGSPTAEAAGCGTAEAAR | |
| Seg 120 | ATGTATSEGSPEEEETAEAAGCGTAEAAGASPGTSSTGSPGSSPSASTGTGPGSSPS | 312 |
| | ASTGTGPGTPGSGTASSSPGSSTPSGATGSPGSSPSASTGTGPGASPGTSSTGSPGTP | |
| | GSGTASSSPGSSTPSGATGSPGTPGSGTASSSPGASPGTSSTGSPGASPGTSSTGSPG | |
| | TPGSGTASSSPGSSTPSGATGSPGASPGTSSTGSPGTPGSGTASSSPGSSTPSGATGS | |
| | PGSSPSASTGTGPGSSPSASTGTGPGSSTPSGATGSPGSSTPSGATGSPGASPGTSST | |
| | GSPGASPGTSSTGSPGASPGTSSTGSPTAEAAGCGTAEAAGTPGSGTASSSPGASP | |
| | GTSSTGSPGASPGTSSTGSPGASPGTSSTGSPGSSPSASTGTGPGTPGSGTASSSPGA | |
| | SPGTSSTGSPGASPGTSSTGSPGASPGTSSTGSPGSSTPSGATGSPGSSTPSGATGSP | |
| | GASPGTSSTGSPGTPGSGTASSSPGSSTPSGATGSPGSSTPSGATGSPGSSTPSGATG | |
| | SPGSSPSASTGTGPGASPGTSSTGSPGASPGTSSTGSPGTPGSGTASSSPGASPGTSS | |
| | TGSPGASPGTSSTGSPGASPGTSSTGSPGASPGTSSTGSPTAEAAGCGTAEAAGTP | |
| | GSGTASSSPGSSTPSGATGSPGTPGSGTASSSPGSSTPSGATGSPGTPGSGTASSSPG | |
| | SSTPSGATGSPGSSTPSGATGSPGSSPSASTGTGPGSSPSASTGTGPGASPGTSSTGS | |
| | PGTPGSGTASSSPGSSTPSGATGSPGSSPSASTGTGPGSSPSASTGTGPGASPGTSST | |
| | GSPGASPGTSSTGSPGSSTPSGATGSPGSSPSASTGTGPGASPGTSSTGSPGSSPSAS | |
| | TGTGPGTPGSGTASSSPGSSTPSGATGSPGSSTPSGATGSPGASPGTSSTGSPTAEA | |
| | AGCGTAEAAR | |
| Seg 121 | AEATTAAGGAEEEGASPGTSSTGSPGSSPSASTGTGPGSSPSASTGTGPGTPGSGT | 313 |
| | ASSSPGSSTPSGATGSPGSSPSASTGTGPGASPGTSSTGSPGTPGSGTASSSPGSSTP | |
| | SGATGSPGTPGSGTASSSPGASPGTSSTGSPGASPGTSSTGSPGTPGSGTASSSPGSS | |
| | TPSGATGSPGASPGTSSTGSPGTPGSGTASSSPGSSTPSGATGSPGSSPSASTGTGPG | |
| | SSPSASTGTGPGSSTPSGATGSPGSSTPSGATGSPGASPGTSSTGSPGASPGTSSTGS | |
| | PGASPGTSSTGSPGTPGSGTASSSPGASPGTSSTGSPGASPGTSSTGSPGASPGTSST | |
| | GSPGSSPSASTGTGPGTPGSGTASSSPGASPGTSSTGSPGASPGTSSTGSPGASPGTS | |
| | STGSPGSSTPSGATGSPGSSTPSGATGSPGASPGTSSTGSPTAEAAGCGTAEAAGTP | |
| | GSGTASSSPGSSTPSGATGSPGSSTPSGATGSPGSSTPSGATGSPGSSPSASTGTGPG | |
| | ASPGTSSTGSPGASPGTSSTGSPGTPGSGTASSSPGASPGTSSTGSPGASPGTSSTGS | |
| | PGASPGTSSTGSPGASPGTSSTGSPGTPGSGTASSSPGSSTPSGATGSPGTPGSGTAS | |
| | SSPGSSTPSGATGSPGTPGSGTASSSPGSSTPSGATGSPGSSTPSGATGSPGSSPSAS | |
| | TGTGPGSSPSASTGTGPGASPGTSSTGSPGTPGSGTASSSPGSSTPSGATGSPGSSPS | |
| | ASTGTGPGSSPSASTGTGPGASPGTSSTGSPGASPGTSSTGSPGSSTPSGATGSPGSS | |
| | PSASTGTGPGASPGTSSTGSPGSSPSASTGTGPGTPGSGTASSSPGSSTPSGATGSPG | |
| | SSTPSGATGSPGASPGTSSTGSPRPRPRPRP | |
| Seg 122 | AEATTAAGGAEEETAEAAGCGTAEAAGASPGTSSTGSPGSSPSASTGTGPGSSPSA | 314 |
| | STGTGPGTPGSGTASSSPGSSTPSGATGSPGSSPSASTGTGPGASPGTSSTGSPGTPG | |
| | SGTASSSPGSSTPSGATGSPGTPGSGTASSSPGASPGTSSTGSPGASPGTSSTGSPGT | |
| | PGSGTASSSPGSSTPSGATGSPGASPGTSSTGSPGTPGSGTASSSPGSSTPSGATGSP | |
| | GSSPSASTGTGPGSSPSASTGTGPGSSTPSGATGSPGSSTPSGATGSPGASPGTSSTG | |
| | SPGASPGTSSTGSPGASPGTSSTGSPGTPGSGTASSSPGASPGTSSTGSPGASPGTSS | |
| | TGSPGASPGTSSTGSPGSSPSASTGTGPGTPGSGTASSSPGASPGTSSTGSPGASPGT | |
| | SSTGSPGASPGTSSTGSPGSSTPSGATGSPGSSTPSGATGSPGASPGTSSTGSPGTPG | |
| | SGTASSSPGSSTPSGATGSPGSSTPSGATGSPGSSTPSGATGSPGSSPSASTGTGPGA | |
| | SPGTSSTGSPGASPGTSSTGSPGTPGSGTASSSPGASPGTSSTGSPGASPGTSSTGSP | |
| | GASPGTSSTGSPGASPGTSSTGSPGTPGSGTASSSPGSSTPSGATGSPGTPGSGTASS | |
| | SPGSSTPSGATGSPGTPGSGTASSSPGSSTPSGATGSPGSSTPSGATGSPGSSPSAST | |
| | GTGPGSSPSASTGTGPGASPGTSSTGSPGTPGSGTASSSPGSSTPSGATGSPGSSPSA | |
| | STGTGPGSSPSASTGTGPGASPGTSSTGSPGASPGTSSTGSPGSSTPSGATGSPGSSP | |
| | SASTGTGPGASPGTSSTGSPGSSPSASTGTGPGTPGSGTASSSPGSSTPSGATGSPGS | |
| | STPSGATGSPGASPGTSSTGSPTAEAAGCGTAEAARPRPRPRP | |
| Seg 123 | AEATTAAGGAEEETAEAAGCGTAEAAGASPGTSSTGSPGSSPSASTGTGPGSSPSA | 315 |
| | STGTGPGTPGSGTASSSPGSSTPSGATGSPGSSPSASTGTGPGASPGTSSTGSPGTPG | |
| | SGTASSSPGSSTPSGATGSPGTPGSGTASSSPGASPGTSSTGSPGASPGTSSTGSPGT | |
| | PGSGTASSSPGSSTPSGATGSPGASPGTSSTGSPGTPGSGTASSSPGSSTPSGATGSP | |
| | GSSPSASTGTGPGSSPSASTGTGPGSSTPSGATGSPGSSTPSGATGSPGASPGTSSTG | |
| | SPGASPGTSSTGSPGASPGTSSTGSPGTPGSGTASSSPGASPGTSSTGSPGASPGTSS | |
| | TGSPGASPGTSSTGSPGSSPSASTGTGPGTPGSGTASSSPGASPGTSSTGSPGASPGT | |
| | SSTGSPGASPGTSSTGSPGSSTPSGATGSPGSSTPSGATGSPGASPGTSSTGSPTAEA | |
| | AGCGTAEAAGTPGSGTASSSPGSSTPSGATGSPGSSTPSGATGSPGSSTPSGATGSP | |
| | GSSPSASTGTGPGASPGTSSTGSPGASPGTSSTGSPGTPGSGTASSSPGASPGTSSTG | |
| | SPGASPGTSSTGSPGASPGTSSTGSPGASPGTSSTGSPGTPGSGTASSSPGSSTPSGA | |
| | TGSPGTPGSGTASSSPGSSTPSGATGSPGTPGSGTASSSPGSSTPSGATGSPGSSTPS | |
| | GATGSPGSSPSASTGTGPGSSPSASTGTGPGASPGTSSTGSPGTPGSGTASSSPGSST | |
| | PSGATGSPGSSPSASTGTGPGSSPSASTGTGPGASPGTSSTGSPGASPGTSSTGSPGS | |
| | STPSGATGSPGSSPSASTGTGPGASPGTSSTGSPGSSPSASTGTGPGTPGSGTASSSP | |
| | GSSTPSGATGSPGSSTPSGATGSPGASPGTSSTGSPTAEAAGCGTAEAARPRPRPRP | |
| Seg 124 | AEATTAAGGAEEETAEAAGCGTAEAAGASPGTSSTGSPGSSPSASTGTGPGSSPSA | 316 |
| | STGTGPGTPGSGTASSSPGSSTPSGATGSPGSSPSASTGTGPGASPGTSSTGSPGTPG | |
| | SGTASSSPGSSTPSGATGSPGTPGSGTASSSPGASPGTSSTGSPGASPGTSSTGSPGT | |
| | PGSGTASSSPGSSTPSGATGSPGASPGTSSTGSPGTPGSGTASSSPGSSTPSGATGSP | |
| | GSSPSASTGTGPGSSPSASTGTGPGSSTPSGATGSPGSSTPSGATGSPGASPGTSSTG | |
| | SPGASPGTSSTGSPGASPGTSSTGSPTAEAAGCGTAEAAGTPGSGTASSSPGASPGT | |
| | SSTGSPGASPGTSSTGSPGASPGTSSTGSPGSSPSASTGTGPGTPGSGTASSSPGASP | |
| | GTSSTGSPGASPGTSSTGSPGASPGTSSTGSPGSSTPSGATGSPGSSTPSGATGSPGA | |
| | SPGTSSTGSPGTPGSGTASSSPGSSTPSGATGSPGSSTPSGATGSPGSSTPSGATGSP | |
| | GSSPSASTGTGPGASPGTSSTGSPGASPGTSSTGSPGTPGSGTASSSPGASPGTSSTG | |
| | SPGASPGTSSTGSPGASPGTSSTGSPGASPGTSSTGSPTAEAAGCGTAEAAGTPGSG | |
| | TASSSPGSSTPSGATGSPGTPGSGTASSSPGSSTPSGATGSPGTPGSGTASSSPGSST | |
| | PSGATGSPGSSTPSGATGSPGSSPSASTGTGPGSSPSASTGTGPGASPGTSSTGSPGT | |
| | PGSGTASSSPGSSTPSGATGSPGSSPSASTGTGPGSSPSASTGTGPGASPGTSSTGSP | |
| | GASPGTSSTGSPGSSTPSGATGSPGSSPSASTGTGPGASPGTSSTGSPGSSPSASTGT | |
| | GPGTPGSGTASSSPGSSTPSGATGSPGSSTPSGATGSPGASPGTSSTGSPTAEAAGC | |
| | GTAEAARPRPRPRP | |
| Seg 125 | AEATTAAGGAEEEGASPGTSSTGSPGSSPSASTGTGPGSSPSASTGTGPGTPGSGT | 317 |
| | ASSSPGSSTPSGATGSPGSSPSASTGTGPGASPGTSSTGSPGTPGSGTASSSPGSSTP | |
| | SGATGSPGTPGSGTASSSPGASPGTSSTGSPGASPGTSSTGSPGTPGSGTASSSPGSS | |
| | TPSGATGSPGASPGTSSTGSPGTPGSGTASSSPGSSTPSGATGSPGSSPSASTGTGPG | |
| | SSPSASTGTGPGSSTPSGATGSPGSSTPSGATGSPGASPGTSSTGSPGASPGTSSTGS | |
| | PGASPGTSSTGSPGTPGSGTASSSPGASPGTSSTGSPGASPGTSSTGSPGASPGTSST | |
| | GSPGSSPSASTGTGPGTPGSGTASSSPGASPGTSSTGSPGASPGTSSTGSPGASPGTS | |
| | STGSPGSSTPSGATGSPGSSTPSGATGSPGASPGTSSTGSPTAEAAGCGTAEAAGTP | |
| | GSGTASSSPGSSTPSGATGSPGSSTPSGATGSPGSSTPSGATGSPGSSPSASTGTGPG | |
| | ASPGTSSTGSPGASPGTSSTGSPGTPGSGTASSSPGASPGTSSTGSPGASPGTSSTGS | |
| | PGASPGTSSTGSPGASPGTSSTGSPGTPGSGTASSSPGSSTPSGATGSPGTPGSGTAS | |
| | SSPGSSTPSGATGSPGTPGSGTASSSPGSSTPSGATGSPGSSTPSGATGSPGSSPSAS | |
| | TGTGPGSSPSASTGTGPGASPGTSSTGSPGTPGSGTASSSPGSSTPSGATGSPGSSPS | |
| | ASTGTGPGSSPSASTGTGPGASPGTSSTGSPGASPGTSSTGSPGSSTPSGATGSPGSS | |
| | PSASTGTGPGASPGTSSTGSPGSSPSASTGTGPGTPGSGTASSSPGSSTPSGATGSPG | |
| | SSTPSGATGSPGASPGTSSTGSPR | |
| Seg 126 | AEATTAAGGAEEETAEAAGCGTAEAAGASPGTSSTGSPGSSPSASTGTGPGSSPSA | 318 |
| | STGTGPGTPGSGTASSSPGSSTPSGATGSPGSSPSASTGTGPGASPGTSSTGSPGTPG | |
| | SGTASSSPGSSTPSGATGSPGTPGSGTASSSPGASPGTSSTGSPGASPGTSSTGSPGT | |
| | PGSGTASSSPGSSTPSGATGSPGASPGTSSTGSPGTPGSGTASSSPGSSTPSGATGSP | |
| | GSSPSASTGTGPGSSPSASTGTGPGSSTPSGATGSPGSSTPSGATGSPGASPGTSSTG | |
| | SPGASPGTSSTGSPGASPGTSSTGSPGTPGSGTASSSPGASPGTSSTGSPGASPGTSS | |
| | TGSPGASPGTSSTGSPGSSPSASTGTGPGTPGSGTASSSPGASPGTSSTGSPGASPGT | |
| | SSTGSPGASPGTSSTGSPGSSTPSGATGSPGSSTPSGATGSPGASPGTSSTGSPGTPG | |
| | SGTASSSPGSSTPSGATGSPGSSTPSGATGSPGSSTPSGATGSPGSSPSASTGTGPGA | |
| | SPGTSSTGSPGASPGTSSTGSPGTPGSGTASSSPGASPGTSSTGSPGASPGTSSTGSP | |
| | GASPGTSSTGSPGASPGTSSTGSPGTPGSGTASSSPGSSTPSGATGSPGTPGSGTASS | |
| | SPGSSTPSGATGSPGTPGSGTASSSPGSSTPSGATGSPGSSTPSGATGSPGSSPSAST | |
| | GTGPGSSPSASTGTGPGASPGTSSTGSPGTPGSGTASSSPGSSTPSGATGSPGSSPSA | |
| | STGTGPGSSPSASTGTGPGASPGTSSTGSPGASPGTSSTGSPGSSTPSGATGSPGSSP | |
| | SASTGTGPGASPGTSSTGSPGSSPSASTGTGPGTPGSGTASSSPGSSTPSGATGSPGS | |
| | STPSGATGSPGASPGTSSTGSPTAEAAGCGTAEAAR | |
| Seg 127 | AEATTAAGGAEEETAEAAGCGTAEAAGASPGTSSTGSPGSSPSASTGTGPGSSPSA | 319 |
| | STGTGPGTPGSGTASSSPGSSTPSGATGSPGSSPSASTGTGPGASPGTSSTGSPGTPG | |
| | SGTASSSPGSSTPSGATGSPGTPGSGTASSSPGASPGTSSTGSPGASPGTSSTGSPGT | |
| | PGSGTASSSPGSSTPSGATGSPGASPGTSSTGSPGTPGSGTASSSPGSSTPSGATGSP | |
| | GSSPSASTGTGPGSSPSASTGTGPGSSTPSGATGSPGSSTPSGATGSPGASPGTSSTG | |
| | SPGASPGTSSTGSPGASPGTSSTGSPGTPGSGTASSSPGASPGTSSTGSPGASPGTSS | |
| | TGSPGASPGTSSTGSPGSSPSASTGTGPGTPGSGTASSSPGASPGTSSTGSPGASPGT | |
| | SSTGSPGASPGTSSTGSPGSSTPSGATGSPGSSTPSGATGSPGASPGTSSTGSPTAEA | |
| | AGCGTAEAAGTPGSGTASSSPGSSTPSGATGSPGSSTPSGATGSPGSSTPSGATGSP | |
| | GSSPSASTGTGPGASPGTSSTGSPGASPGTSSTGSPGTPGSGTASSSPGASPGTSSTG | |
| | SPGASPGTSSTGSPGASPGTSSTGSPGASPGTSSTGSPGTPGSGTASSSPGSSTPSGA | |
| | TGSPGTPGSGTASSSPGSSTPSGATGSPGTPGSGTASSSPGSSTPSGATGSPGSSTPS | |
| | GATGSPGSSPSASTGTGPGSSPSASTGTGPGASPGTSSTGSPGTPGSGTASSSPGSST | |
| | PSGATGSPGSSPSASTGTGPGSSPSASTGTGPGASPGTSSTGSPGASPGTSSTGSPGS | |
| | STPSGATGSPGSSPSASTGTGPGASPGTSSTGSPGSSPSASTGTGPGTPGSGTASSSP | |
| | GSSTPSGATGSPGSSTPSGATGSPGASPGTSSTGSPTAEAAGCGTAEAAR | |
| Seg 128 | AEATTAAGGAEEETAEAAGCGTAEAAGASPGTSSTGSPGSSPSASTGTGPGSSPSA | 320 |
| | STGTGPGTPGSGTASSSPGSSTPSGATGSPGSSPSASTGTGPGASPGTSSTGSPGTPG | |
| | SGTASSSPGSSTPSGATGSPGTPGSGTASSSPGASPGTSSTGSPGASPGTSSTGSPGT | |
| | PGSGTASSSPGSSTPSGATGSPGASPGTSSTGSPGTPGSGTASSSPGSSTPSGATGSP | |
| | GSSPSASTGTGPGSSPSASTGTGPGSSTPSGATGSPGSSTPSGATGSPGASPGTSSTG | |
| | SPGASPGTSSTGSPGASPGTSSTGSPTAEAAGCGTAEAAGTPGSGTASSSPGASPGT | |
| | SSTGSPGASPGTSSTGSPGASPGTSSTGSPGSSPSASTGTGPGTPGSGTASSSPGASP | |
| | GTSSTGSPGASPGTSSTGSPGASPGTSSTGSPGSSTPSGATGSPGSSTPSGATGSPGA | |
| | SPGTSSTGSPGTPGSGTASSSPGSSTPSGATGSPGSSTPSGATGSPGSSTPSGATGSP | |
| | GSSPSASTGTGPGASPGTSSTGSPGASPGTSSTGSPGTPGSGTASSSPGASPGTSSTG | |
| | SPGASPGTSSTGSPGASPGTSSTGSPGASPGTSSTGSPTAEAAGCGTAEAAGTPGSG | |
| | TASSSPGSSTPSGATGSPGTPGSGTASSSPGSSTPSGATGSPGTPGSGTASSSPGSST | |
| | PSGATGSPGSSTPSGATGSPGSSPSASTGTGPGSSPSASTGTGPGASPGTSSTGSPGT | |
| | PGSGTASSSPGSSTPSGATGSPGSSPSASTGTGPGSSPSASTGTGPGASPGTSSTGSP | |
| | GASPGTSSTGSPGSSTPSGATGSPGSSPSASTGTGPGASPGTSSTGSPGSSPSASTGT | |
| | GPGTPGSGTASSSPGSSTPSGATGSPGSSTPSGATGSPGASPGTSSTGSPTAEAAGC | |
| | GTAEAAR | |
| Seg 129 | AEATTAAGGAEEETAEAAGCGTAEAAGASPGTSSTGSPGSSPSASTGTGPGSSPSA | 321 |
| | STGTGPGTPGSGTASSSPGSSTPSGATGSPGSSPSASTGTGPGASPGTSSTGSPGTPG | |
| | SGTASSSPGSSTPSGATGSPGTPGSGTASSSPGASPGTSSTGSPGASPGTSSTGSPGT | |
| | PGSGTASSSPGSSTPSGATGSPGASPGTSSTGSPGTPGSGTASSSPGSSTPSGATGSP | |
| | GSSPSASTGTGPGSSPSASTGTGPGSSTPSGATGSPGSSTPSGATGSPGASPGTSSTG | |
| | SPGASPGTSSTGSPGASPGTSSTGSPGGKPGGTPGSGTASSSPGASPGTSSTGSPGA | |
| | SPGTSSTGSPGASPGTSSTGSPGSSPSASTGTGPGTPGSGTASSSPGASPGTSSTGSP | |
| | GASPGTSSTGSPGASPGTSSTGSPGSSTPSGATGSPGSSTPSGATGSPGASPGTSSTG | |
| | SPGTPGSGTASSSPGSSTPSGATGSPGSSTPSGATGSPGSSTPSGATGSPGSSPSAST | |
| | GTGPGASPGTSSTGSPGASPGTSSTGSPGTPGSGTASSSPGASPGTSSTGSPGASPG | |
| | TSSTGSPGASPGTSSTGSPGASPGTSSTGSPTAEAAGCGTAEAAGTPGSGTASSSPG | |
| | SSTPSGATGSPGTPGSGTASSSPGSSTPSGATGSPGTPGSGTASSSPGSSTPSGATGS | |
| | PGSSTPSGATGSPGSSPSASTGTGPGSSPSASTGTGPGASPGTSSTGSPGTPGSGTAS | |
| | SSPGSSTPSGATGSPGSSPSASTGTGPGSSPSASTGTGPGASPGTSSTGSPGASPGTS | |
| | STGSPGSSTPSGATGSPGSSPSASTGTGPGASPGTSSTGSPGSSPSASTGTGPGTPGS | |
| | GTASSSPGSSTPSGATGSPGSSTPSGATGSPGASPGTSSTGSPGGKPGR | |
| Seg 130 | AEATTAAGGAEEETAEAAGCGTAEAAGASPGTSSTGSPGSSPSASTGTGPGSSPSA | 322 |
| | STGTGPGTPGSGTASSSPGSSTPSGATGSPGSSPSASTGTGPGASPGTSSTGSPGTPG | |
| | SGTASSSPGSSTPSGATGSPGTPGSGTASSSPGASPGTSSTGSPGASPGTSSTGSPGT | |
| | PGSGTASSSPGSSTPSGATGSPGASPGTSSTGSPGTPGSGTASSSPGSSTPSGATGSP | |
| | GSSPSASTGTGPGSSPSASTGTGPGSSTPSGATGSPGSSTPSGATGSPGASPGTSSTG | |
| | SPGASPGTSSTGSPGASPGTSSTGSPTAEAAGCGTAEAAGTPGSGTASSSPGASPGT | |
| | SSTGSPGASPGTSSTGSPGASPGTSSTGSPGSSPSASTGTGPGTPGSGTASSSPGASP | |
| | GTSSTGSPGASPGTSSTGSPGASPGTSSTGSPGSSTPSGATGSPGSSTPSGATGSPGA | |
| | SPGTSSTGSPGTPGSGTASSSPGSSTPSGATGSPGSSTPSGATGSPGSSTPSGATGSP | |
| | GSSPSASTGTGPGASPGTSSTGSPGASPGTSSTGSPGTPGSGTASSSPGASPGTSSTG | |
| | SPGASPGTSSTGSPGASPGTSSTGSPGASPGTSSTGSPTAEAAGCGTAEAAGTPGSG | |
| | TASSSPGSSTPSGATGSPGTPGSGTASSSPGSSTPSGATGSPGTPGSGTASSSPGSST | |
| | PSGATGSPGSSTPSGATGSPGSSPSASTGTGPGSSPSASTGTGPGASPGTSSTGSPGT | |
| | PGSGTASSSPGSSTPSGATGSPGSSPSASTGTGPGSSPSASTGTGPGASPGTSSTGSP | |
| | GASPGTSSTGSPGSSTPSGATGSPGSSPSASTGTGPGASPGTSSTGSPGSSPSASTGT | |
| | GPGTPGSGTASSSPGSSTPSGATGSPGSSTPSGATGSPGASPGTSSTGSPGGKPGR | |
| Seg 131 | AEATTAAGGAEEEGGKPGGASPGTSSTGSPGSSPSASTGTGPGSSPSASTGTGPGT | 323 |
| | PGSGTASSSPGSSTPSGATGSPGSSPSASTGTGPGASPGTSSTGSPGTPGSGTASSSP | |
| | GSSTPSGATGSPGTPGSGTASSSPGASPGTSSTGSPGASPGTSSTGSPGTPGSGTASS | |
| | SPGSSTPSGATGSPGASPGTSSTGSPGTPGSGTASSSPGSSTPSGATGSPGSSPSAST | |
| | GTGPGSSPSASTGTGPGSSTPSGATGSPGSSTPSGATGSPGASPGTSSTGSPGASPG | |
| | TSSTGSPGASPGTSSTGSPGGKPGGTPGSGTASSSPGASPGTSSTGSPGASPGTSST | |
| | GSPGASPGTSSTGSPGSSPSASTGTGPGTPGSGTASSSPGASPGTSSTGSPGASPGTS | |
| | STGSPGASPGTSSTGSPGSSTPSGATGSPGSSTPSGATGSPGASPGTSSTGSPGTPGS | |
| | GTASSSPGSSTPSGATGSPGSSTPSGATGSPGSSTPSGATGSPGSSPSASTGTGPGAS | |
| | PGTSSTGSPGASPGTSSTGSPGTPGSGTASSSPGASPGTSSTGSPGASPGTSSTGSPG | |
| | ASPGTSSTGSPGASPGTSSTGSPGGKPGGTPGSGTASSSPGSSTPSGATGSPGTPGS | |
| | GTASSSPGSSTPSGATGSPGTPGSGTASSSPGSSTPSGATGSPGSSTPSGATGSPGSS | |
| | PSASTGTGPGSSPSASTGTGPGASPGTSSTGSPGTPGSGTASSSPGSSTPSGATGSPG | |
| | SSPSASTGTGPGSSPSASTGTGPGASPGTSSTGSPGASPGTSSTGSPGSSTPSGATGS | |
| | PGSSPSASTGTGPGASPGTSSTGSPGSSPSASTGTGPGTPGSGTASSSPGSSTPSGAT | |
| | GSPGSSTPSGATGSPGASPGTSSTGSPTAEAAGCGTAEAAR | |
| Seg 132 | AEATTAAGGAEEETAEAAGCGTAEAAGASPGTSSTGSPGSSPSASTGTGPGSSPSA | 324 |
| | STGTGPGTPGSGTASSSPGSSTPSGATGSPGSSPSASTGTGPGASPGTSSTGSPGTPG | |
| | SGTASSSPGSSTPSGATGSPGTPGSGTASSSPGASPGTSSTGSPGASPGTSSTGSPGT | |
| | PGSGTASSSPGSSTPSGATGSPGASPGTSSTGSPGTPGSGTASSSPGSSTPSGATGSP | |
| | GSSPSASTGTGPGSSPSASTGTGPGSSTPSGATGSPGSSTPSGATGSPGASPGTSSTG | |
| | SPGASPGTSSTGSPGASPGTSSTGSPGGKPGGTPGSGTASSSPGASPGTSSTGSPGA | |
| | SPGTSSTGSPGASPGTSSTGSPGSSPSASTGTGPGTPGSGTASSSPGASPGTSSTGSP | |
| | GASPGTSSTGSPGASPGTSSTGSPGSSTPSGATGSPGSSTPSGATGSPGASPGTSSTG | |
| | SPGTPGSGTASSSPGSSTPSGATGSPGSSTPSGATGSPGSSTPSGATGSPGSSPSAST | |
| | GTGPGASPGTSSTGSPGASPGTSSTGSPGTPGSGTASSSPGASPGTSSTGSPGASPG | |
| | TSSTGSPGASPGTSSTGSPGASPGTSSTGSPTAEAAGCGTAEAAGTPGSGTASSSPG | |
| | SSTPSGATGSPGTPGSGTASSSPGSSTPSGATGSPGTPGSGTASSSPGSSTPSGATGS | |
| | PGSSTPSGATGSPGSSPSASTGTGPGSSPSASTGTGPGASPGTSSTGSPGTPGSGTAS | |
| | SSPGSSTPSGATGSPGSSPSASTGTGPGSSPSASTGTGPGASPGTSSTGSPGASPGTS | |
| | STGSPGSSTPSGATGSPGSSPSASTGTGPGASPGTSSTGSPGSSPSASTGTGPGTPGS | |
| | GTASSSPGSSTPSGATGSPGSSTPSGATGSPGASPGTSSTGSPGGKPGR | |
| Seg 133 | AEATTAAGGAEEEGASPGTSSTGSPGSSPSASTGTGPGSSPSASTGTGPGTPGSGT | 325 |
| | ASSSPGSSTPSGATGSPGSSPSASTGTGPGASPGTSSTGSPGTPGSGTASSSPGSSTP | |
| | SGATGSPGTPGSGTASSSPGASPGTSSTGSPGASPGTSSTGSPGTPGSGTASSSPGSS | |
| | TPSGATGSPGASPGTSSTGSPGTPGSGTASSSPGSSTPSGATGSPGSSPSASTGTGPG | |
| | SSPSASTGTGPGSSTPSGATGSPGSSTPSGATGSPGASPGTSSTGSPGASPGTSSTGS | |
| | PGASPGTSSTGSPGTPGSGTASSSPGASPGTSSTGSPGASPGTSSTGSPGASPGTSST | |
| | GSPGSSPSASTGTGPGTPGSGTASSSPGASPGTSSTGSPGASPGTSSTGSPGASPGTS | |
| | STGSPGSSTPSGATGSPGSSTPSGATGSPGASPGTSSTGSPGTPGSGTASSSPGSSTP | |
| | SGATGSPGSSTPSGATGSPGSSTPSGATGSPGSSPSASTGTGPGASPGTSSTGSPGAS | |
| | PGTSSTGSPGTPGSGTASSSPGASPGTSSTGSPGASPGTSSTGSPGASPGTSSTGSPG | |
| | ASPGTSSTGSPTAEAAGCGTAEAAR | |
| Seg 134 | AEATTAAGGAEEEGASPGTSSTGSPGSSPSASTGTGPGSSPSASTGTGPGTPGSGT | 326 |
| | ASSSPGSSTPSGATGSPGSSPSASTGTGPGASPGTSSTGSPGTPGSGTASSSPGSSTP | |
| | SGATGSPGTPGSGTASSSPGASPGTSSTGSPGASPGTSSTGSPGTPGSGTASSSPGSS | |
| | TPSGATGSPGASPGTSSTGSPGTPGSGTASSSPGSSTPSGATGSPGSSPSASTGTGPG | |
| | SSPSASTGTGPGSSTPSGATGSPGSSTPSGATGSPGASPGTSSTGSPGASPGTSSTGS | |
| | PGASPGTSSTGSPGTPGSGTASSSPGASPGTSSTGSPGASPGTSSTGSPGASPGTSST | |
| | GSPGSSPSASTGTGPGTPGSGTASSSPGASPGTSSTGSPGASPGTSSTGSPGASPGTS | |
| | STGSPGSSTPSGATGSPGSSTPSGATGSPGASPGTSSTGSPTAEAAGCGTAEAAR | |
| Seg 135 | AEATTAAGGAEEEGASPGTSSTGSPGSSPSASTGTGPGSSPSASTGTGPGTPGSGT | 327 |
| | ASSSPGSSTPSGATGSPGSSPSASTGTGPGASPGTSSTGSPGTPGSGTASSSPGSSTP | |
| | SGATGSPGTPGSGTASSSPGASPGTSSTGSPGASPGTSSTGSPGTPGSGTASSSPGSS | |
| | TPSGATGSPGASPGTSSTGSPGTPGSGTASSSPGSSTPSGATGSPGSSPSASTGTGPG | |
| | SSPSASTGTGPGSSTPSGATGSPGSSTPSGATGSPGASPGTSSTGSPGASPGTSSTGS | |
| | PGASPGTSSTGSPTAEAAGCGTAEAAR | |
| Seg 136 | AEATTAAGGAEEEGASPGTSSTGSPGSSPSASTGTGPGSSPSASTGTGPGTPGSGT | 328 |
| | ASSSPGSSTPSGATGSPGSSPSASTGTGPGASPGTSSTGSPGTPGSGTASSSPGSSTP | |
| | SGATGSPGTPGSGTASSSPGASPGTSSTGSPGASPGTSSTGSPTAEAAGCGTAEAA | |
| | R | |
| Seg 137 | AEATTAAGGAEEEGASPGTSSTGSPGSSPSASTGTGPGSSPSASTGTGPGTPGSGT | 329 |
| | ASSSPGSSTPSGATGSPGSSPSASTGTGPGASPGTSSTGSPGTPGSGTASSSPGSSTP | |
| | SGATGSPGTPGSGTASSSPGASPGTSSTGSPGASPGTSSTGSPGTPGSGTASSSPGSS | |
| | TPSGATGSPGASPGTSSTGSPGTPGSGTASSSPGSSTPSGATGSPGSSPSASTGTGPG | |
| | SSPSASTGTGPGSSTPSGATGSPGSSTPSGATGSPGASPGTSSTGSPGASPGTSSTGS | |
| | PGASPGTSSTGSPGTPGSGTASSSPGASPGTSSTGSPGASPGTSSTGSPGASPGTSST | |
| | GSPGSSPSASTGTGPGTPGSGTASSSPGASPGTSSTGSPGASPGTSSTGSPGASPGTS | |
| | STGSPGSSTPSGATGSPGSSTPSGATGSPGASPGTSSTGSPGTPGSGTASSSPGSSTP | |
| | SGATGSPGSSTPSGATGSPGSSTPSGATGSPGSSPSASTGTGPGASPGTSSTGSPGAS | |
| | PGTSSTGSPGTPGSGTASSSPGASPGTSSTGSPGASPGTSSTGSPGASPGTSSTGSPG | |
| | ASPGTSSTGSPTAEAAGCGTAEAAR | |
| Seg 138 | AEATTAAGGAEEEGASPGTSSTGSPGSSPSASTGTGPGSSPSASTGTGPGTPGSGT | 330 |
| | ASSSPGSSTPSGATGSPGSSPSASTGTGPGASPGTSSTGSPGTPGSGTASSSPGSSTP | |
| | SGATGSPGTPGSGTASSSPGASPGTSSTGSPGASPGTSSTGSPGTPGSGTASSSPGSS | |
| | TPSGATGSPGASPGTSSTGSPGTPGSGTASSSPGSSTPSGATGSPGSSPSASTGTGPG | |
| | SSPSASTGTGPGSSTPSGATGSPGSSTPSGATGSPGASPGTSSTGSPGASPGTSSTGS | |
| | PGASPGTSSTGSPGTPGSGTASSSPGASPGTSSTGSPGASPGTSSTGSPGASPGTSST | |
| | GSPGSSPSASTGTGPGTPGSGTASSSPGASPGTSSTGSPGASPGTSSTGSPGASPGTS | |
| | STGSPGSSTPSGATGSPGSSTPSGATGSPGASPGTSSTGSPTAEAAGCGTAEAAR | |
| Seg 139 | AEATTAAGGAEEEGASPGTSSTGSPGSSPSASTGTGPGSSPSASTGTGPGTPGSGT | 331 |
| | ASSSPGSSTPSGATGSPGSSPSASTGTGPGASPGTSSTGSPGTPGSGTASSSPGSSTP | |
| | SGATGSPGTPGSGTASSSPGASPGTSSTGSPGASPGTSSTGSPGTPGSGTASSSPGSS | |
| | TPSGATGSPGASPGTSSTGSPGTPGSGTASSSPGSSTPSGATGSPGSSPSASTGTGPG | |
| | SSPSASTGTGPGSSTPSGATGSPGSSTPSGATGSPGASPGTSSTGSPGASPGTSSTGS | |
| | PGASPGTSSTGSPTAEAAGCGTAEAAR | |
| Seg 140 | AEATTAAGGAEEEGASPGTSSTGSPGSSPSASTGTGPGSSPSASTGTGPGTPGSGT | 332 |
| | ASSSPGSSTPSGATGSPGSSPSASTGTGPGASPGTSSTGSPGTPGSGTASSSPGSSTP | |
| | SGATGSPGTPGSGTASSSPGASPGTSSTGSPGASPGTSSTGSPTAEAAGCGTAEAA | |
| | R | |
| Seg 141 | AEATTAAGGAEEEGASPGTSSTGSPGSSPSASTGTGPGSSPSASTGTGPGTPGSGT | 333 |
| | ASSSPGSSTPSGATGSPGSSPSASTGTGPGASPGTSSTGSPGTPGSGTASSSPGSSTP | |
| | SGATGSPGTPGSGTASSSPGASPGTSSTGSPGASPGTSSTGSPGTPGSGTASSSPGSS | |
| | TPSGATGSPGASPGTSSTGSPGTPGSGTASSSPGSSTPSGATGSPGSSPSASTGTGPG | |
| | SSPSASTGTGPGSSTPSGATGSPGSSTPSGATGSPGASPGTSSTGSPGASPGTSSTGS | |
| | PGASPGTSSTGSPGTPGSGTASSSPGASPGTSSTGSPGASPGTSSTGSPGASPGTSST | |
| | GSPGSSPSASTGTGPGTPGSGTASSSPGASPGTSSTGSPGASPGTSSTGSPGASPGTS | |
| | STGSPGSSTPSGATGSPGSSTPSGATGSPGASPGTSSTGSPGTPGSGTASSSPGSSTP | |
| | SGATGSPGSSTPSGATGSPGSSTPSGATGSPGSSPSASTGTGPGASPGTSSTGSPGAS | |
| | PGTSSTGSPGTPGSGTASSSPGASPGTSSTGSPGASPGTSSTGSPGASPGTSSTGSPG | |
| | ASPGTSSTGSPGGKPGR | |
| Seg 142 | AEATTAAGGAEEEGASPGTSSTGSPGSSPSASTGTGPGSSPSASTGTGPGTPGSGT | 334 |
| | ASSSPGSSTPSGATGSPGSSPSASTGTGPGASPGTSSTGSPGTPGSGTASSSPGSSTP | |
| | SGATGSPGTPGSGTASSSPGASPGTSSTGSPGASPGTSSTGSPGTPGSGTASSSPGSS | |
| | TPSGATGSPGASPGTSSTGSPGTPGSGTASSSPGSSTPSGATGSPGSSPSASTGTGPG | |
| | SSPSASTGTGPGSSTPSGATGSPGSSTPSGATGSPGASPGTSSTGSPGASPGTSSTGS | |
| | PGASPGTSSTGSPGTPGSGTASSSPGASPGTSSTGSPGASPGTSSTGSPGASPGTSST | |
| | GSPGSSPSASTGTGPGTPGSGTASSSPGASPGTSSTGSPGASPGTSSTGSPGASPGTS | |
| | STGSPGSSTPSGATGSPGSSTPSGATGSPGASPGTSSTGSPGGKPGR | |
| Seg 143 | AEATTAAGGAEEEGASPGTSSTGSPGSSPSASTGTGPGSSPSASTGTGPGTPGSGT | 335 |
| | ASSSPGSSTPSGATGSPGSSPSASTGTGPGASPGTSSTGSPGTPGSGTASSSPGSSTP | |
| | SGATGSPGTPGSGTASSSPGASPGTSSTGSPGASPGTSSTGSPGTPGSGTASSSPGSS | |
| | TPSGATGSPGASPGTSSTGSPGTPGSGTASSSPGSSTPSGATGSPGSSPSASTGTGPG | |
| | SSPSASTGTGPGSSTPSGATGSPGSSTPSGATGSPGASPGTSSTGSPGASPGTSSTGS | |
| | PGASPGTSSTGSPGGKPGR | |
| Seg 144 | AEATTAAGGAEEEGASPGTSSTGSPGSSPSASTGTGPGSSPSASTGTGPGTPGSGT | 336 |
| | ASSSPGSSTPSGATGSPGSSPSASTGTGPGASPGTSSTGSPGTPGSGTASSSPGSSTP | |
| | SGATGSPGTPGSGTASSSPGASPGTSSTGSPGASPGTSSTGSPGGKPGR | |
| Seg 145 | AEATTAAGGAEEEGASPGTSSTGSPGSSPSASTGTGPGSSPSASTGTGPGTPGSGT | 337 |
| | ASSSPGSSTPSGATGSPGSSPSASTGTGPGASPGTSSTGSPGTPGSGTASSSPGSSTP | |
| | SGATGSPGTPGSGTASSSPGASPGTSSTGSPGASPGTSSTGSPGTPGSGTASSSPGSS | |
| | TPSGATGSPGASPGTSSTGSPGTPGSGTASSSPGSSTPSGATGSPGSSPSASTGTGPG | |
| | SSPSASTGTGPGSSTPSGATGSPGSSTPSGATGSPGASPGTSSTGSPGASPGTSSTGS | |
| | PGASPGTSSTGSPGTPGSGTASSSPGASPGTSSTGSPGASPGTSSTGSPGASPGTSST | |
| | GSPGSSPSASTGTGPGTPGSGTASSSPGASPGTSSTGSPGASPGTSSTGSPGASPGTS | |
| | STGSPGSSTPSGATGSPGSSTPSGATGSPGASPGTSSTGSPGTPGSGTASSSPGSSTP | |
| | SGATGSPGSSTPSGATGSPGSSTPSGATGSPGSSPSASTGTGPGASPGTSSTGSPGAS | |
| | PGTSSTGSPGTPGSGTASSSPGASPGTSSTGSPGASPGTSSTGSPGASPGTSSTGSPG | |
| | ASPGTSSTGSPGGKPGR | |
| Seg 146 | AEATTAAGGAEEEGASPGTSSTGSPGSSPSASTGTGPGSSPSASTGTGPGTPGSGT | 338 |
| | ASSSPGSSTPSGATGSPGSSPSASTGTGPGASPGTSSTGSPGTPGSGTASSSPGSSTP | |
| | SGATGSPGTPGSGTASSSPGASPGTSSTGSPGASPGTSSTGSPGTPGSGTASSSPGSS | |
| | TPSGATGSPGASPGTSSTGSPGTPGSGTASSSPGSSTPSGATGSPGSSPSASTGTGPG | |
| | SSPSASTGTGPGSSTPSGATGSPGSSTPSGATGSPGASPGTSSTGSPGASPGTSSTGS | |
| | PGASPGTSSTGSPGTPGSGTASSSPGASPGTSSTGSPGASPGTSSTGSPGASPGTSST | |
| | GSPGSSPSASTGTGPGTPGSGTASSSPGASPGTSSTGSPGASPGTSSTGSPGASPGTS | |
| | STGSPGSSTPSGATGSPGSSTPSGATGSPGASPGTSSTGSPGGKPGR | |
| Seg 147 | AEATTAAGGAEEEGASPGTSSTGSPGSSPSASTGTGPGSSPSASTGTGPGTPGSGT | 339 |
| | ASSSPGSSTPSGATGSPGSSPSASTGTGPGASPGTSSTGSPGTPGSGTASSSPGSSTP | |
| | SGATGSPGTPGSGTASSSPGASPGTSSTGSPGASPGTSSTGSPGTPGSGTASSSPGSS | |
| | TPSGATGSPGASPGTSSTGSPGTPGSGTASSSPGSSTPSGATGSPGSSPSASTGTGPG | |
| | SSPSASTGTGPGSSTPSGATGSPGSSTPSGATGSPGASPGTSSTGSPGASPGTSSTGS | |
| | PGASPGTSSTGSPGGKPGR | |
| Seg 148 | AEATTAAGGAEEEGASPGTSSTGSPGSSPSASTGTGPGSSPSASTGTGPGTPGSGT | 340 |
| | ASSSPGSSTPSGATGSPGSSPSASTGTGPGASPGTSSTGSPGTPGSGTASSSPGSSTP | |
| | SGATGSPGTPGSGTASSSPGASPGTSSTGSPGASPGTSSTGSPGGKPGR | |
| Seg 149 | GSEPATSGSETPGTSESATPESGPGSEPATSGSETPGSPAGSPTSTEEGTSTEPSEGS | 341 |
| | APGSEPATSGSETPGSEPATSGSETPGSEPATSGSETPGTSTEPSEGSAPGTSESATP | |
| | ESGPGSEPATSGSETPGTSTEPSEGSAPGGGSPAGSCTSPGGSPAGSPTSTEEGTSES | |
| | ATPESGPGTSTEPSEGSAPGSPAGSPTSTEEGTSTEPSEGSAPGTSTEPSEGSAPGTS | |
| | ESATPESGPGSEPATSGSETPGSEPATSGSETPGSPAGSPTSTEEGTSESATPESGPG | |
| | TSTEPSEGSAPGTSTEPSEGSAPGSPAGSPTSTEEGTSTEPSEGSAPGTSTEPSEGSAP | |
| | GTSESATPESGPGTSTEPSEGSAPGTSESATPESGPGSEPATSGSETPGTSTEPSEGS | |
| | APGTSTEPSEGSAPGTSESATPESGPGTSESATPESGPGSPAGSPTSTEEGTSESATP | |
| | ESGPGSEPATSGSETPGTSESATPESGPGTSTEPSEGSAPGTSTEPSEGSAPGTSTEPS | |
| | EGSAPGTSTEPSEGSAPGTSTEPSEGSAPGTSTEPSEGSAPGSPAGSPTSTEEGTSTE | |
| | PSEGSAPGTSESATPESGPGSEPATSGSETPGTSESATPESGPGSEPATSGSETPGTS | |
| | ESATPESGPGTSTEPSEGSAPGTSESATPESGPGSPAGSPTSTEEGSPAGSPTSTEEG | |
| | SPAGSPTSTEEGTSESATPESGPGTSTEPSEGSAPG | |
| Seg 150 | MAEPAGSPTSTEEGTPGSGTASSSPGSSTPSGATGSPGASPGTSSTGSPGSPAGSPTS | 342 |
| | TEEGTSESATPESGPGTSTEPSEGSAPGSPAGSPTSTEEGTSTEPSEGSAPGTSTEPSE | |
| | GSAPGTSESATPESGPGSEPATSGSETPGSEPATSGSETPGSPAGSPTSTEEGTSESA | |
| | TPESGPGTSTEPSEGSAPGTSTEPSEGSAPGSPAGSPTSTEEGTSTEPSEGSAPGTST | |
| | EPSEGSAPGTSESATPESGPGTSTEPSEGSAPGTSESATPESGPGSEPATSGSETPGT | |
| | STEPSEGSAPGTSTEPSEGSAPGTSESATPESGPGTSESATPESGPGSPAGSPTSTEE | |
| | GTSESATPESGPGSEPATSGSETPGTSESATPESGPGTSTEPSEGSAPGTSTEPSEGS | |
| | APGTSTEPSEGSAPGTSTEPSEGSAPGTSTEPSEGSAPGTSTEPSEGSAPGSPAGSPT | |
| | STEEGTSTEPSEGSAPGTSESATPESGPGSEPATSGSETPGTSESATPESGPGSEPAT | |
| | SGSETPGTSESATPESGPGTSTEPSEGSAPGTSESATPESGPGSPAGSPTSTEEGSPA | |
| | GSPTSTEEGSPAGSPTSTEEGTSESATPESGPGTSTEPSEGSAPGTSESATPESGPGS | |
| | EPATSGSETPGTSESATPESGPGSEPATSGSETPGTSESATPESGPGTSTEPSEGSAP | |
| | GSPAGSPTSTEEGTSESATPESGPGSEPATSGSETPGTSESATPESGPGSPAGSPTST | |
| | EEGSPAGSPTSTEEGTSTEPSEGSAPGTSESATPESGPGTSESATPESGPGTSESATP | |
| | ESGPGSEPATSGSETPGSEPATSGSETPGSPAGSPTSTEEGTSTEPSEGSAPGTSTEPS | |
| | EGSAPGSEPATSGSETPGTSESATPESGPGTSTEPSEGSAPGGASASCAPSTGGGSE | |
| | PATSGSETPGTSESATPESGPGSEPATSGSETPGSPAGSPTSTEEGTSTEPSEGSAPG | |
| | SEPATSGSETPGSEPATSGSETPGSEPATSGSETPGTSTEPSEGSAPGTSESATPESGP | |
| | GSEPATSGSETPGTSTEPSEGSAPG | |
| Seg 151 | GSPAGSPTSTEEGTSESATPESGPGTSTEPSEGSAPGSPAGSPTSTEEGTSTEPSEGS | 343 |
| | APGTSTEPSEGSAPGTSESATPESGPGSEPATSGSETPGSEPATSGSETPGSPAGSPT | |
| | STEEGTSESATPESGPGTSTEPSEGSAPGTSTEPSEGSAPGSPAGSPTSTEEGTSTEPS | |
| | EGSAPGTSTEPSEGSAPGTSESATPESGPGTSTEPSEGSAPGTSESATPESGPGSEPA | |
| | TSGSETPGTSTEPSEGSAPGTSTEPSEGSAPGTSESATPESGPGTSESATPESGPGSP | |
| | AGSPTSTEEGTSESATPESGPGSEPATSGSETPGTSESATPESGPGTSTEPSEGSAPG | |
| | TSTEPSEGSAPGTSTEPSEGSAPGTSTEPSEGSAPGTSTEPSEGSAPGTSTEPSEGSAP | |
| | GSPAGSPTSTEEGTSTEPSEGSAPGTSESATPESGPGSEPATSGSETPGTSESATPES | |
| | GPGSEPATSGSETPGTSESATPESGPGTSTEPSEGSAPGTSESATPESGPGSPAGSPT | |
| | STEEGSPAGSPTSTEEGSPAGSPTSTEEGTSESATPESGPGTSTEPSEGSAPGGGSPA | |
| | GSCTSPGGTSESATPESGPGSEPATSGSETPGTSESATPESGPGSEPATSGSETPGTS | |
| | ESATPESGPGTSTEPSEGSAPGSPAGSPTSTEEGTSESATPESGPGSEPATSGSETPG | |
| | TSESATPESGPGSPAGSPTSTEEGSPAGSPTSTEEGTSTEPSEGSAPGTSESATPESGP | |
| | GTSESATPESGPGTSESATPESGPGSEPATSGSETPGSEPATSGSETPGSPAGSPTST | |
| | EEGTSTEPSEGSAPGTSTEPSEGSAPGSEPATSGSETPGTSESATPESGPGTSTEPSE | |
| | GSAPG | |
| Seg 152 | MAEPAGSPTSTEEGTPGSGTASSSPGSSTPSGATGSPGASPGTSSTGSPGGPEPTCP | 344 |
| | APSGGGSPAGSPTSTEEGTSESATPESGPGTSTEPSEGSAPGSPAGSPTSTEEGTSTE | |
| | PSEGSAPGTSTEPSEGSAPGTSESATPESGPGSEPATSGSETPGSEPATSGSETPGSP | |
| | AGSPTSTEEGTSESATPESGPGTSTEPSEGSAPGTSTEPSEGSAPGSPAGSPTSTEEG | |
| | TSTEPSEGSAPGTSTEPSEGSAPGTSESATPESGPGTSTEPSEGSAPGTSESATPESGP | |
| | GSEPATSGSETPGTSTEPSEGSAPGTSTEPSEGSAPGTSESATPESGPGTSESATPES | |
| | GPGSPAGSPTSTEEGTSESATPESGPGSEPATSGSETPGTSESATPESGPGTSTEPSE | |
| | GSAPGTSTEPSEGSAPGTSTEPSEGSAPGTSTEPSEGSAPGTSTEPSEGSAPGTSTEP | |
| | SEGSAPGSPAGSPTSTEEGTSTEPSEGSAPGTSESATPESGPGSEPATSGSETPGTSE | |
| | SATPESGPGSEPATSGSETPGTSESATPESGPGTSTEPSEGSAPGTSESATPESGPGS | |
| | PAGSPTSTEEGSPAGSPTSTEEGSPAGSPTSTEEGTSESATPESGPGTSTEPSEGSAP | |
| | GTSESATPESGPGSEPATSGSETPGTSESATPESGPGSEPATSGSETPGTSESATPES | |
| | GPGTSTEPSEGSAPGSPAGSPTSTEEGTSESATPESGPGSEPATSGSETPGTSESATP | |
| | ESGPGSPAGSPTSTEEGSPAGSPTSTEEGTSTEPSEGSAPGTSESATPESGPGTSESA | |
| | TPESGPGTSESATPESGPGSEPATSGSETPGSEPATSGSETPGSPAGSPTSTEEGTST | |
| | EPSEGSAPGTSTEPSEGSAPGSEPATSGSETPGTSESATPESGPGTSTEPSEGSAPG | |
| Seg 153 | GTSESATPESGPGSEPATSGSETPGTSESATPESGPGSEPATSGSETPGTSESATPES | 345 |
| | GPGTSTEPSEGSAPGSPAGSPTSTEEGTSESATPESGPGSEPATSGSETPGTSESATP | |
| | ESGPGSPAGSPTSTEEGSPAGSPTSTEEGTSTEPSEGSAPGTSESATPESGPGTSESA | |
| | TPESGPGTSESATPESGPGSEPATSGSETPGSEPATSGSETPGSPAGSPTSTEEGTST | |
| | EPSEGSAPGTSTEPSEGSAPGSEPATSGSETPGTSESATPESGPGTSTEPSEGSAPGG | |
| | GSPAGSCTSPGGTSESATPESGPGSEPATSGSETPGTSESATPESGPGSEPATSGSET | |
| | PGTSESATPESGPGTSTEPSEGSAPGSPAGSPTSTEEGTSESATPESGPGSEPATSGS | |
| | ETPGTSESATPESGPGSPAGSPTSTEEGSPAGSPTSTEEGTSTEPSEGSAPGTSESAT | |
| | PESGPGTSESATPESGPGTSESATPESGPGSEPATSGSETPGSEPATSGSETPGSPAG | |
| | SPTSTEEGTSTEPSEGSAPGTSTEPSEGSAPGSEPATSGSETPGTSESATPESGPGTST | |
| | EPSEGSAPGGGSPAGSCTSPGGTSESATPESGPGSEPATSGSETPGTSESATPESGPG | |
| | SEPATSGSETPGTSESATPESGPGTSTEPSEGSAPGSPAGSPTSTEEGTSESATPESGP | |
| | GSEPATSGSETPGTSESATPESGPGSPAGSPTSTEEGSPAGSPTSTEEGTSTEPSEGS | |
| | APGTSESATPESGPGTSESATPESGPGTSESATPESGPGSEPATSGSETPGSEPATSG | |
| | SETPGSPAGSPTSTEEGTSTEPSEGSAPGTSTEPSEGSAPGSEPATSGSETPGTSESA | |
| | TPESGPGTSTEPSEGSAPG | |
| Seg 154 | MAEPAGSPTSTEEGTPGSGTASSSPGSSTPSGATGSPGASPGTSSTGSPGGASASCA | 346 |
| | PSTGGGSPAGSPTSTEEGTSESATPESGPGTSTEPSEGSAPGSPAGSPTSTEEGTSTE | |
| | PSEGSAPGTSTEPSEGSAPGTSESATPESGPGSEPATSGSETPGSEPATSGSETPGSP | |
| | AGSPTSTEEGTSESATPESGPGTSTEPSEGSAPGTSTEPSEGSAPGSPAGSPTSTEEG | |
| | TSTEPSEGSAPGTSTEPSEGSAPGTSESATPESGPGTSTEPSEGSAPGTSESATPESGP | |
| | GSEPATSGSETPGTSTEPSEGSAPGTSTEPSEGSAPGTSESATPESGPGTSESATPES | |
| | GPGSPAGSPTSTEEGTSESATPESGPGSEPATSGSETPGTSESATPESGPGTSTEPSE | |
| | GSAPGTSTEPSEGSAPGTSTEPSEGSAPGTSTEPSEGSAPGTSTEPSEGSAPGTSTEP | |
| | SEGSAPGSPAGSPTSTEEGTSTEPSEGSAPGTSESATPESGPGSEPATSGSETPGTSE | |
| | SATPESGPGSEPATSGSETPGTSESATPESGPGTSTEPSEGSAPGTSESATPESGPGS | |
| | PAGSPTSTEEGSPAGSPTSTEEGSPAGSPTSTEEGTSESATPESGPGTSTEPSEGSAP | |
| | GGASASCAPSTGGGSEPATSGSETPGTSESATPESGPGSEPATSGSETPGSPAGSPT | |
| | STEEGTSTEPSEGSAPGSEPATSGSETPGSEPATSGSETPGSEPATSGSETPGTSTEPS | |
| | EGSAPGTSESATPESGPGSEPATSGSETPGTSTEPSEGSAPG | |
| Seg 155 | MAEPAGSPTSTEEGASPGTSSTGSPGSSTPSGATGSPGSSTPSGATGSPGGGSPAGS | 347 |
| | CTSPGGTSTEPSEGSAPGSEPATSGSETPGSPAGSPTSTEEGSTSSTAESPGPGTSTP | |
| | ESGSASPGSTSESPSGTAPGSTSESPSGTAPGTSTPESGSASPGTSTPESGSASPGSEP | |
| | ATSGSETPGTSESATPESGPGSPAGSPTSTEEGTSTEPSEGSAPGTSESATPESGPGT | |
| | STEPSEGSAPGTSTEPSEGSAPGSPAGSPTSTEEGTSTEPSEGSAPGTSTEPSEGSAP | |
| | GTSESATPESGPGTSESATPESGPGTSTEPSEGSAPGTSTEPSEGSAPGTSESATPES | |
| | GPGTSTEPSEGSAPGSEPATSGSETPGSPAGSPTSTEEGSSTPSGATGSPGTPGSGTA | |
| | SSSPGSSTPSGATGSPGTSTEPSEGSAPGTSTEPSEGSAPGSEPATSGSETPGSPAGSP | |
| | TSTEEGSPAGSPTSTEEGTSTEPSEGSAPGASASGAPSTGGTSESATPESGPGSPAGS | |
| | PTSTEEGSPAGSPTSTEEGSTSSTAESPGPGSTSESPSGTAPGTSPSGESSTAPGTPGS | |
| | GTASSSPGSSTPSGATGSPGSSPSASTGTGPGSEPATSGSETPGTSESATPESGPGSE | |
| | PATSGSETPGSTSSTAESPGPGSTSSTAESPGPGTSPSGESSTAPGSEPATSGSETPGS | |
| | EPATSGSETPGTSTEPSEGSAPGSTSSTAESPGPGTSTPESGSASPGSTSESPSGTAPG | |
| | TSTEPSEGSAPGTSTEPSEGSAPGTSTEPSEGSAPGSSTPSGATGSPGSSPSASTGTG | |
| | PGASPGTSSTGSPGSEPATSGSETPGTSESATPESGPGSPAGSPTSTEEGSSTPSGAT | |
| | GSPGSSPSASTGTGPGASPGTSSTGSPGTSESATPESGPGTSTEPSEGSAPGTSTEPS | |
| | EGSAPG | |
| Seg 156 | MAEPAGSPTSTEEGASPGTSSTGSPGSSTPSGATGSPGSSTPSGATGSPGGASASCA | 348 |
| | PSTGGGTSTEPSEGSAPGSEPATSGSETPGSPAGSPTSTEEGSTSSTAESPGPGTSTP | |
| | ESGSASPGSTSESPSGTAPGSTSESPSGTAPGTSTPESGSASPGTSTPESGSASPGSEP | |
| | ATSGSETPGTSESATPESGPGSPAGSPTSTEEGTSTEPSEGSAPGTSESATPESGPGT | |
| | STEPSEGSAPGTSTEPSEGSAPGSPAGSPTSTEEGTSTEPSEGSAPGTSTEPSEGSAP | |
| | GTSESATPESGPGTSESATPESGPGTSTEPSEGSAPGTSTEPSEGSAPGTSESATPES | |
| | GPGTSTEPSEGSAPGSEPATSGSETPGSPAGSPTSTEEGSSTPSGATGSPGTPGSGTA | |
| | SSSPGSSTPSGATGSPGTSTEPSEGSAPGTSTEPSEGSAPGSEPATSGSETPGSPAGSP | |
| | TSTEEGSPAGSPTSTEEGTSTEPSEGSAPGPEPTGPAPSGGSEPATSGSETPGTSESA | |
| | TPESGPGSPAGSPTSTEEGTSESATPESGPGSPAGSPTSTEEGSPAGSPTSTEEGTSES | |
| | ATPESGPGSPAGSPTSTEEGSPAGSPTSTEEGSTSSTAESPGPGSTSESPSGTAPGTSP | |
| | SGESSTAPGSTSESPSGTAPGSTSESPSGTAPGTSPSGESSTAPGTSTEPSEGSAPGTS | |
| | ESATPESGPGTSESATPESGPGSEPATSGSETPGTSESATPESGPGTSESATPESGPG | |
| | TSTEPSEGSAPGTSESATPESGPGTSTEPSEGSAPGTSPSGESSTAPGTSPSGESSTAP | |
| | GTSPSGESSTAPGTSTEPSEGSAPGSPAGSPTSTEEGTSTEPSEGSAPGSSPSASTGT | |
| | GPGSSTPSGATGSPGSSTPSGATGSPGSSTPSGATGSPGSSTPSGATGSPGASPGTSS | |
| | TGSPGASASGAPSTGGTSPSGESSTAPGSTSSTAESPGPGTSPSGESSTAPGTSESAT | |
| | PESGPGTSTEPSEGSAPGTSTEPSEGSAPGSSPSASTGTGPGSSTPSGATGSPGASPG | |
| | TSSTGSPGTSTPESGSASPGTSPSGESSTAPGTSPSGESSTAPGTSESATPESGPGSEP | |
| | ATSGSETPGTSTEPSEGSAPGSTSESPSGTAPGSTSESPSGTAPGTSTPESGSASPGSP | |
| | AGSPTSTEEGTSESATPESGPGTSTEPSEGSAPGSPAGSPTSTEEGTSESATPESGPG | |
| | SEPATSGSETPGSSTPSGATGSPGASPGTSSTGSPGSSTPSGATGSPGSTSESPSGTA | |
| | PGTSPSGESSTAPGSTSSTAESPGPGSSTPSGATGSPGASPGTSSTGSPGTPGSGTAS | |
| | SSPGSPAGSPTSTEEGSPAGSPTSTEEGTSTEPSEGSAPG | |
| Seg 157 | MAEPAGSPTSTEEGASPGTSSTGSPGSSTPSGATGSPGSSTPSGATGSPGGPEPTCP | 349 |
| | APSGGGTSTEPSEGSAPGSEPATSGSETPGSPAGSPTSTEEGSTSSTAESPGPGTSTP | |
| | ESGSASPGSTSESPSGTAPGSTSESPSGTAPGTSTPESGSASPGTSTPESGSASPGSEP | |
| | ATSGSETPGTSESATPESGPGSPAGSPTSTEEGTSTEPSEGSAPGTSESATPESGPGT | |
| | STEPSEGSAPGTSTEPSEGSAPGSPAGSPTSTEEGTSTEPSEGSAPGTSTEPSEGSAP | |
| | GTSESATPESGPGTSESATPESGPGTSTEPSEGSAPGTSTEPSEGSAPGTSESATPES | |
| | GPGTSTEPSEGSAPGSEPATSGSETPGSPAGSPTSTEEGSSTPSGATGSPGTPGSGTA | |
| | SSSPGSSTPSGATGSPGTSTEPSEGSAPGTSTEPSEGSAPGSEPATSGSETPGSPAGSP | |
| | TSTEEGSPAGSPTSTEEGTSTEPSEGSAPGASASGAPSTGGTSESATPESGPGSPAGS | |
| | PTSTEEGSPAGSPTSTEEGSTSSTAESPGPGSTSESPSGTAPGTSPSGESSTAPGTPGS | |
| | GTASSSPGSSTPSGATGSPGSSPSASTGTGPGSEPATSGSETPGTSESATPESGPGSE | |
| | PATSGSETPGSTSSTAESPGPGSTSSTAESPGPGTSPSGESSTAPGSEPATSGSETPGS | |
| | EPATSGSETPGTSTEPSEGSAPGSTSSTAESPGPGTSTPESGSASPGSTSESPSGTAPG | |
| | TSTEPSEGSAPGTSTEPSEGSAPGTSTEPSEGSAPGSSTPSGATGSPGSSPSASTGTG | |
| | PGASPGTSSTGSPGSEPATSGSETPGTSESATPESGPGSPAGSPTSTEEGSSTPSGAT | |
| | GSPGSSPSASTGTGPGASPGTSSTGSPGTSESATPESGPGTSTEPSEGSAPGTSTEPS | |
| | EGSAPG | |
| Seg 158 | MAEPAGSPTSTEEGASPGTSSTGSPGSSTPSGATGSPGSSTPSGATGSPGGPEPTCP | 350 |
| | APSGGGTSTEPSEGSAPGSEPATSGSETPGSPAGSPTSTEEGSTSSTAESPGPGTSTP | |
| | ESGSASPGSTSESPSGTAPGSTSESPSGTAPGTSTPESGSASPGTSTPESGSASPGSEP | |
| | ATSGSETPGTSESATPESGPGSPAGSPTSTEEGTSTEPSEGSAPGTSESATPESGPGT | |
| | STEPSEGSAPGTSTEPSEGSAPGSPAGSPTSTEEGTSTEPSEGSAPGTSTEPSEGSAP | |
| | GTSESATPESGPGTSESATPESGPGTSTEPSEGSAPGTSTEPSEGSAPGTSESATPES | |
| | GPGTSTEPSEGSAPGSEPATSGSETPGSPAGSPTSTEEGSSTPSGATGSPGTPGSGTA | |
| | SSSPGSSTPSGATGSPGTSTEPSEGSAPGTSTEPSEGSAPGSEPATSGSETPGSPAGSP | |
| | TSTEEGSPAGSPTSTEEGTSTEPSEGSAPGASASGAPSTGGTSESATPESGPGSPAGS | |
| | PTSTEEGSPAGSPTSTEEGSTSSTAESPGPGSTSESPSGTAPGTSPSGESSTAPGTPGS | |
| | GTASSSPGSSTPSGATGSPGSSPSASTGTGPGSEPATSGSETPGTSESATPESGPGSE | |
| | PATSGSETPGSTSSTAESPGPGSTSSTAESPGPGTSPSGESSTAPGSEPATSGSETPGS | |
| | EPATSGSETPGTSTEPSEGSAPGSTSSTAESPGPGTSTPESGSASPGSTSESPSGTAPG | |
| | TSTEPSEGSAPGTSTEPSEGSAPGTSTEPSEGSAPGSSTPSGATGSPGSSPSASTGTG | |
| | PGASPGTSSTGSPGSEPATSGSETPGTSESATPESGPGSPAGSPTSTEEGSSTPSGAT | |
| | GSPGSSPSASTGTGPGASPGTSSTGSPGTSESATPESGPGTSTEPSEGSAPGTSTEPS | |
| | EGSAPGGPEPTCPAPSGGMAEPAGSPTSTEEGASPGTSSTGSPGSSTPSGATGSPGS | |
| | STPSGATGSPG | |
| Seg 159 | GSEPATSGSETPGTSESATPESGPGSEPATSGSETPGSPAGSPTSTEEGTSTEPSEGS | 351 |
| | APGSEPATSGSETPGSEPATSGSETPGSEPATSGSETPGTSTEPSEGSAPGTSESATP | |
| | ESGPGSEPATSGSETPGTSTEPSEGSAPGGGSPAGSKTSPGGSPAGSPTSTEEGTSES | |
| | ATPESGPGTSTEPSEGSAPGSPAGSPTSTEEGTSTEPSEGSAPGTSTEPSEGSAPGTS | |
| | ESATPESGPGSEPATSGSETPGSEPATSGSETPGSPAGSPTSTEEGTSESATPESGPG | |
| | TSTEPSEGSAPGTSTEPSEGSAPGSPAGSPTSTEEGTSTEPSEGSAPGTSTEPSEGSAP | |
| | GTSESATPESGPGTSTEPSEGSAPGTSESATPESGPGSEPATSGSETPGTSTEPSEGS | |
| | APGTSTEPSEGSAPGTSESATPESGPGTSESATPESGPGSPAGSPTSTEEGTSESATP | |
| | ESGPGSEPATSGSETPGTSESATPESGPGTSTEPSEGSAPGTSTEPSEGSAPGTSTEPS | |
| | EGSAPGTSTEPSEGSAPGTSTEPSEGSAPGTSTEPSEGSAPGSPAGSPTSTEEGTSTE | |
| | PSEGSAPGTSESATPESGPGSEPATSGSETPGTSESATPESGPGSEPATSGSETPGTS | |
| | ESATPESGPGTSTEPSEGSAPGTSESATPESGPGSPAGSPTSTEEGSPAGSPTSTEEG | |
| | SPAGSPTSTEEGTSESATPESGPGTSTEPSEGSAPG | |
| Seg 160 | MAEPAGSPTSTEEGTPGSGTASSSPGSSTPSGATGSPGASPGTSSTGSPGSPAGSPTS | 352 |
| | TEEGTSESATPESGPGTSTEPSEGSAPGSPAGSPTSTEEGTSTEPSEGSAPGTSTEPSE | |
| | GSAPGTSESATPESGPGSEPATSGSETPGSEPATSGSETPGSPAGSPTSTEEGTSESA | |
| | TPESGPGTSTEPSEGSAPGTSTEPSEGSAPGSPAGSPTSTEEGTSTEPSEGSAPGTST | |
| | EPSEGSAPGTSESATPESGPGTSTEPSEGSAPGTSESATPESGPGSEPATSGSETPGT | |
| | STEPSEGSAPGTSTEPSEGSAPGTSESATPESGPGTSESATPESGPGSPAGSPTSTEE | |
| | GTSESATPESGPGSEPATSGSETPGTSESATPESGPGTSTEPSEGSAPGTSTEPSEGS | |
| | APGTSTEPSEGSAPGTSTEPSEGSAPGTSTEPSEGSAPGTSTEPSEGSAPGSPAGSPT | |
| | STEEGTSTEPSEGSAPGTSESATPESGPGSEPATSGSETPGTSESATPESGPGSEPAT | |
| | SGSETPGTSESATPESGPGTSTEPSEGSAPGTSESATPESGPGSPAGSPTSTEEGSPA | |
| | GSPTSTEEGSPAGSPTSTEEGTSESATPESGPGTSTEPSEGSAPGTSESATPESGPGS | |
| | EPATSGSETPGTSESATPESGPGSEPATSGSETPGTSESATPESGPGTSTEPSEGSAP | |
| | GSPAGSPTSTEEGTSESATPESGPGSEPATSGSETPGTSESATPESGPGSPAGSPTST | |
| | EEGSPAGSPTSTEEGTSTEPSEGSAPGTSESATPESGPGTSESATPESGPGTSESATP | |
| | ESGPGSEPATSGSETPGSEPATSGSETPGSPAGSPTSTEEGTSTEPSEGSAPGTSTEPS | |
| | EGSAPGSEPATSGSETPGTSESATPESGPGTSTEPSEGSAPGGASASKAPSTGGGSE | |
| | PATSGSETPGTSESATPESGPGSEPATSGSETPGSPAGSPTSTEEGTSTEPSEGSAPG | |
| | SEPATSGSETPGSEPATSGSETPGSEPATSGSETPGTSTEPSEGSAPGTSESATPESGP | |
| | GSEPATSGSETPGTSTEPSEGSAPG | |
| Seg 161 | GSPAGSPTSTEEGTSESATPESGPGTSTEPSEGSAPGSPAGSPTSTEEGTSTEPSEGS | 353 |
| | APGTSTEPSEGSAPGTSESATPESGPGSEPATSGSETPGSEPATSGSETPGSPAGSPT | |
| | STEEGTSESATPESGPGTSTEPSEGSAPGTSTEPSEGSAPGSPAGSPTSTEEGTSTEPS | |
| | EGSAPGTSTEPSEGSAPGTSESATPESGPGTSTEPSEGSAPGTSESATPESGPGSEPA | |
| | TSGSETPGTSTEPSEGSAPGTSTEPSEGSAPGTSESATPESGPGTSESATPESGPGSP | |
| | AGSPTSTEEGTSESATPESGPGSEPATSGSETPGTSESATPESGPGTSTEPSEGSAPG | |
| | TSTEPSEGSAPGTSTEPSEGSAPGTSTEPSEGSAPGTSTEPSEGSAPGTSTEPSEGSAP | |
| | GSPAGSPTSTEEGTSTEPSEGSAPGTSESATPESGPGSEPATSGSETPGTSESATPES | |
| | GPGSEPATSGSETPGTSESATPESGPGTSTEPSEGSAPGTSESATPESGPGSPAGSPT | |
| | STEEGSPAGSPTSTEEGSPAGSPTSTEEGTSESATPESGPGTSTEPSEGSAPGGGSPA | |
| | GSKTSPGGTSESATPESGPGSEPATSGSETPGTSESATPESGPGSEPATSGSETPGTS | |
| | ESATPESGPGTSTEPSEGSAPGSPAGSPTSTEEGTSESATPESGPGSEPATSGSETPG | |
| | TSESATPESGPGSPAGSPTSTEEGSPAGSPTSTEEGTSTEPSEGSAPGTSESATPESGP | |
| | GTSESATPESGPGTSESATPESGPGSEPATSGSETPGSEPATSGSETPGSPAGSPTST | |
| | EEGTSTEPSEGSAPGTSTEPSEGSAPGSEPATSGSETPGTSESATPESGPGTSTEPSE | |
| | GSAPG | |
| Seg 162 | MAEPAGSPTSTEEGTPGSGTASSSPGSSTPSGATGSPGASPGTSSTGSPGGASASKA | 354 |
| | PSTGGGSPAGSPTSTEEGTSESATPESGPGTSTEPSEGSAPGSPAGSPTSTEEGTSTE | |
| | PSEGSAPGTSTEPSEGSAPGTSESATPESGPGSEPATSGSETPGSEPATSGSETPGSP | |
| | AGSPTSTEEGTSESATPESGPGTSTEPSEGSAPGTSTEPSEGSAPGSPAGSPTSTEEG | |
| | TSTEPSEGSAPGTSTEPSEGSAPGTSESATPESGPGTSTEPSEGSAPGTSESATPESGP | |
| | GSEPATSGSETPGTSTEPSEGSAPGTSTEPSEGSAPGTSESATPESGPGTSESATPES | |
| | GPGSPAGSPTSTEEGTSESATPESGPGSEPATSGSETPGTSESATPESGPGTSTEPSE | |
| | GSAPGTSTEPSEGSAPGTSTEPSEGSAPGTSTEPSEGSAPGTSTEPSEGSAPGTSTEP | |
| | SEGSAPGSPAGSPTSTEEGTSTEPSEGSAPGTSESATPESGPGSEPATSGSETPGTSE | |
| | SATPESGPGSEPATSGSETPGTSESATPESGPGTSTEPSEGSAPGTSESATPESGPGS | |
| | PAGSPTSTEEGSPAGSPTSTEEGSPAGSPTSTEEGTSESATPESGPGTSTEPSEGSAP | |
| | GTSESATPESGPGSEPATSGSETPGTSESATPESGPGSEPATSGSETPGTSESATPES | |
| | GPGTSTEPSEGSAPGSPAGSPTSTEEGTSESATPESGPGSEPATSGSETPGTSESATP | |
| | ESGPGSPAGSPTSTEEGSPAGSPTSTEEGTSTEPSEGSAPGTSESATPESGPGTSESA | |
| | TPESGPGTSESATPESGPGSEPATSGSETPGSEPATSGSETPGSPAGSPTSTEEGTST | |
| | EPSEGSAPGTSTEPSEGSAPGSEPATSGSETPGTSESATPESGPGTSTEPSEGSAPG | |
| Seg 163 | GTSESATPESGPGSEPATSGSETPGTSESATPESGPGSEPATSGSETPGTSESATPES | 355 |
| | GPGTSTEPSEGSAPGSPAGSPTSTEEGTSESATPESGPGSEPATSGSETPGTSESATP | |
| | ESGPGSPAGSPTSTEEGSPAGSPTSTEEGTSTEPSEGSAPGTSESATPESGPGTSESA | |
| | TPESGPGTSESATPESGPGSEPATSGSETPGSEPATSGSETPGSPAGSPTSTEEGTST | |
| | EPSEGSAPGTSTEPSEGSAPGSEPATSGSETPGTSESATPESGPGTSTEPSEGSAPGG | |
| | GSPAGSKTSPGGTSESATPESGPGSEPATSGSETPGTSESATPESGPGSEPATSGSET | |
| | PGTSESATPESGPGTSTEPSEGSAPGSPAGSPTSTEEGTSESATPESGPGSEPATSGS | |
| | ETPGTSESATPESGPGSPAGSPTSTEEGSPAGSPTSTEEGTSTEPSEGSAPGTSESAT | |
| | PESGPGTSESATPESGPGTSESATPESGPGSEPATSGSETPGSEPATSGSETPGSPAG | |
| | SPTSTEEGTSTEPSEGSAPGTSTEPSEGSAPGSEPATSGSETPGTSESATPESGPGTST | |
| | EPSEGSAPGGGSPAGSKTSPGGTSESATPESGPGSEPATSGSETPGTSESATPESGPG | |
| | SEPATSGSETPGTSESATPESGPGTSTEPSEGSAPGSPAGSPTSTEEGTSESATPESGP | |
| | GSEPATSGSETPGTSESATPESGPGSPAGSPTSTEEGSPAGSPTSTEEGTSTEPSEGS | |
| | APGTSESATPESGPGTSESATPESGPGTSESATPESGPGSEPATSGSETPGSEPATSG | |
| | SETPGSPAGSPTSTEEGTSTEPSEGSAPGTSTEPSEGSAPGSEPATSGSETPGTSESA | |
| | TPESGPGTSTEPSEGSAPG | |
| Seg 164 | MAEPAGSPTSTEEGTPGSGTASSSPGSSTPSGATGSPGASPGTSSTGSPGGGSPAGS | 356 |
| | KTSPGGSPAGSPTSTEEGTSESATPESGPGTSTEPSEGSAPGSPAGSPTSTEEGTSTE | |
| | PSEGSAPGTSTEPSEGSAPGTSESATPESGPGSEPATSGSETPGSEPATSGSETPGSP | |
| | AGSPTSTEEGTSESATPESGPGTSTEPSEGSAPGTSTEPSEGSAPGSPAGSPTSTEEG | |
| | TSTEPSEGSAPGTSTEPSEGSAPGTSESATPESGPGTSTEPSEGSAPGTSESATPESGP | |
| | GSEPATSGSETPGTSTEPSEGSAPGTSTEPSEGSAPGTSESATPESGPGTSESATPES | |
| | GPGSPAGSPTSTEEGTSESATPESGPGSEPATSGSETPGTSESATPESGPGTSTEPSE | |
| | GSAPGTSTEPSEGSAPGTSTEPSEGSAPGTSTEPSEGSAPGTSTEPSEGSAPGTSTEP | |
| | SEGSAPGSPAGSPTSTEEGTSTEPSEGSAPGTSESATPESGPGSEPATSGSETPGTSE | |
| | SATPESGPGSEPATSGSETPGTSESATPESGPGTSTEPSEGSAPGTSESATPESGPGS | |
| | PAGSPTSTEEGSPAGSPTSTEEGSPAGSPTSTEEGTSESATPESGPGTSTEPSEGSAP | |
| | GGGSPAGSKTSPGGSEPATSGSETPGTSESATPESGPGSEPATSGSETPGSPAGSPTS | |
| | TEEGTSTEPSEGSAPGSEPATSGSETPGSEPATSGSETPGSEPATSGSETPGTSTEPSE | |
| | GSAPGTSESATPESGPGSEPATSGSETPGTSTEPSEGSAPG | |
| Seg 165 | MAEPAGSPTSTEEGASPGTSSTGSPGSSTPSGATGSPGSSTPSGATGSPGGGSPAGS | 357 |
| | KTSPGGTSTEPSEGSAPGSEPATSGSETPGSPAGSPTSTEEGSTSSTAESPGPGTSTP | |
| | ESGSASPGSTSESPSGTAPGSTSESPSGTAPGTSTPESGSASPGTSTPESGSASPGSEP | |
| | ATSGSETPGTSESATPESGPGSPAGSPTSTEEGTSTEPSEGSAPGTSESATPESGPGT | |
| | STEPSEGSAPGTSTEPSEGSAPGSPAGSPTSTEEGTSTEPSEGSAPGTSTEPSEGSAP | |
| | GTSESATPESGPGTSESATPESGPGTSTEPSEGSAPGTSTEPSEGSAPGTSESATPES | |
| | GPGTSTEPSEGSAPGSEPATSGSETPGSPAGSPTSTEEGSSTPSGATGSPGTPGSGTA | |
| | SSSPGSSTPSGATGSPGTSTEPSEGSAPGTSTEPSEGSAPGSEPATSGSETPGSPAGSP | |
| | TSTEEGSPAGSPTSTEEGTSTEPSEGSAPGASASGAPSTGGTSESATPESGPGSPAGS | |
| | PTSTEEGSPAGSPTSTEEGSTSSTAESPGPGSTSESPSGTAPGTSPSGESSTAPGTPGS | |
| | GTASSSPGSSTPSGATGSPGSSPSASTGTGPGSEPATSGSETPGTSESATPESGPGSE | |
| | PATSGSETPGSTSSTAESPGPGSTSSTAESPGPGTSPSGESSTAPGSEPATSGSETPGS | |
| | EPATSGSETPGTSTEPSEGSAPGSTSSTAESPGPGTSTPESGSASPGSTSESPSGTAPG | |
| | TSTEPSEGSAPGTSTEPSEGSAPGTSTEPSEGSAPGSSTPSGATGSPGSSPSASTGTG | |
| | PGASPGTSSTGSPGSEPATSGSETPGTSESATPESGPGSPAGSPTSTEEGSSTPSGAT | |
| | GSPGSSPSASTGTGPGASPGTSSTGSPGTSESATPESGPGTSTEPSEGSAPGTSTEPS | |
| | EGSAPG | |
| Seg 166 | MAEPAGSPTSTEEGASPGTSSTGSPGSSTPSGATGSPGSSTPSGATGSPGGASASKA | 358 |
| | PSTGGGTSTEPSEGSAPGSEPATSGSETPGSPAGSPTSTEEGSTSSTAESPGPGTSTP | |
| | ESGSASPGSTSESPSGTAPGSTSESPSGTAPGTSTPESGSASPGTSTPESGSASPGSEP | |
| | ATSGSETPGTSESATPESGPGSPAGSPTSTEEGTSTEPSEGSAPGTSESATPESGPGT | |
| | STEPSEGSAPGTSTEPSEGSAPGSPAGSPTSTEEGTSTEPSEGSAPGTSTEPSEGSAP | |
| | GTSESATPESGPGTSESATPESGPGTSTEPSEGSAPGTSTEPSEGSAPGTSESATPES | |
| | GPGTSTEPSEGSAPGSEPATSGSETPGSPAGSPTSTEEGSSTPSGATGSPGTPGSGTA | |
| | SSSPGSSTPSGATGSPGTSTEPSEGSAPGTSTEPSEGSAPGSEPATSGSETPGSPAGSP | |
| | TSTEEGSPAGSPTSTEEGTSTEPSEGSAPGPEPTGPAPSGGSEPATSGSETPGTSESA | |
| | TPESGPGSPAGSPTSTEEGTSESATPESGPGSPAGSPTSTEEGSPAGSPTSTEEGTSES | |
| | ATPESGPGSPAGSPTSTEEGSPAGSPTSTEEGSTSSTAESPGPGSTSESPSGTAPGTSP | |
| | SGESSTAPGSTSESPSGTAPGSTSESPSGTAPGTSPSGESSTAPGTSTEPSEGSAPGTS | |
| | ESATPESGPGTSESATPESGPGSEPATSGSETPGTSESATPESGPGTSESATPESGPG | |
| | TSTEPSEGSAPGTSESATPESGPGTSTEPSEGSAPGTSPSGESSTAPGTSPSGESSTAP | |
| | GTSPSGESSTAPGTSTEPSEGSAPGSPAGSPTSTEEGTSTEPSEGSAPGSSPSASTGT | |
| | GPGSSTPSGATGSPGSSTPSGATGSPGSSTPSGATGSPGSSTPSGATGSPGASPGTSS | |
| | TGSPGASASGAPSTGGTSPSGESSTAPGSTSSTAESPGPGTSPSGESSTAPGTSESAT | |
| | PESGPGTSTEPSEGSAPGTSTEPSEGSAPGSSPSASTGTGPGSSTPSGATGSPGASPG | |
| | TSSTGSPGTSTPESGSASPGTSPSGESSTAPGTSPSGESSTAPGTSESATPESGPGSEP | |
| | ATSGSETPGTSTEPSEGSAPGSTSESPSGTAPGSTSESPSGTAPGTSTPESGSASPGSP | |
| | AGSPTSTEEGTSESATPESGPGTSTEPSEGSAPGSPAGSPTSTEEGTSESATPESGPG | |
| | SEPATSGSETPGSSTPSGATGSPGASPGTSSTGSPGSSTPSGATGSPGSTSESPSGTA | |
| | PGTSPSGESSTAPGSTSSTAESPGPGSSTPSGATGSPGASPGTSSTGSPGTPGSGTAS | |
| | SSPGSPAGSPTSTEEGSPAGSPTSTEEGTSTEPSEGSAPG | |
| Seg 167 | MAEPAGSPTSTEEGASPGTSSTGSPGSSTPSGATGSPGSSTPSGATGSPGGASASKA | 359 |
| | PSTGGGTSTEPSEGSAPGSEPATSGSETPGSPAGSPTSTEEGSTSSTAESPGPGTSTP | |
| | ESGSASPGSTSESPSGTAPGSTSESPSGTAPGTSTPESGSASPGTSTPESGSASPGSEP | |
| | ATSGSETPGTSESATPESGPGSPAGSPTSTEEGTSTEPSEGSAPGTSESATPESGPGT | |
| | STEPSEGSAPGTSTEPSEGSAPGSPAGSPTSTEEGTSTEPSEGSAPGTSTEPSEGSAP | |
| | GTSESATPESGPGTSESATPESGPGTSTEPSEGSAPGTSTEPSEGSAPGTSESATPES | |
| | GPGTSTEPSEGSAPGSEPATSGSETPGSPAGSPTSTEEGSSTPSGATGSPGTPGSGTA | |
| | SSSPGSSTPSGATGSPGTSTEPSEGSAPGTSTEPSEGSAPGSEPATSGSETPGSPAGSP | |
| | TSTEEGSPAGSPTSTEEGTSTEPSEGSAPGASASGAPSTGGTSESATPESGPGSPAGS | |
| | PTSTEEGSPAGSPTSTEEGSTSSTAESPGPGSTSESPSGTAPGTSPSGESSTAPGTPGS | |
| | GTASSSPGSSTPSGATGSPGSSPSASTGTGPGSEPATSGSETPGTSESATPESGPGSE | |
| | PATSGSETPGSTSSTAESPGPGSTSSTAESPGPGTSPSGESSTAPGSEPATSGSETPGS | |
| | EPATSGSETPGTSTEPSEGSAPGSTSSTAESPGPGTSTPESGSASPGSTSESPSGTAPG | |
| | TSTEPSEGSAPGTSTEPSEGSAPGTSTEPSEGSAPGSSTPSGATGSPGSSPSASTGTG | |
| | PGASPGTSSTGSPGSEPATSGSETPGTSESATPESGPGSPAGSPTSTEEGSSTPSGAT | |
| | GSPGSSPSASTGTGPGASPGTSSTGSPGTSESATPESGPGTSTEPSEGSAPGTSTEPS | |
| | EGSAPG | |
| Seg 168 | MAEPAGSPTSTEEGASPGTSSTGSPGSSTPSGATGSPGSSTPSGATGSPGGASASKA | 360 |
| | PSTGGGTSTEPSEGSAPGSEPATSGSETPGSPAGSPTSTEEGSTSSTAESPGPGTSTP | |
| | ESGSASPGSTSESPSGTAPGSTSESPSGTAPGTSTPESGSASPGTSTPESGSASPGSEP | |
| | ATSGSETPGTSESATPESGPGSPAGSPTSTEEGTSTEPSEGSAPGTSESATPESGPGT | |
| | STEPSEGSAPGTSTEPSEGSAPGSPAGSPTSTEEGTSTEPSEGSAPGTSTEPSEGSAP | |
| | GTSESATPESGPGTSESATPESGPGTSTEPSEGSAPGTSTEPSEGSAPGTSESATPES | |
| | GPGTSTEPSEGSAPGSEPATSGSETPGSPAGSPTSTEEGSSTPSGATGSPGTPGSGTA | |
| | SSSPGSSTPSGATGSPGTSTEPSEGSAPGTSTEPSEGSAPGSEPATSGSETPGSPAGSP | |
| | TSTEEGSPAGSPTSTEEGTSTEPSEGSAPGASASGAPSTGGTSESATPESGPGSPAGS | |
| | PTSTEEGSPAGSPTSTEEGSTSSTAESPGPGSTSESPSGTAPGTSPSGESSTAPGTPGS | |
| | GTASSSPGSSTPSGATGSPGSSPSASTGTGPGSEPATSGSETPGTSESATPESGPGSE | |
| | PATSGSETPGSTSSTAESPGPGSTSSTAESPGPGTSPSGESSTAPGSEPATSGSETPGS | |
| | EPATSGSETPGTSTEPSEGSAPGSTSSTAESPGPGTSTPESGSASPGSTSESPSGTAPG | |
| | TSTEPSEGSAPGTSTEPSEGSAPGTSTEPSEGSAPGSSTPSGATGSPGSSPSASTGTG | |
| | PGASPGTSSTGSPGSEPATSGSETPGTSESATPESGPGSPAGSPTSTEEGSSTPSGAT | |
| | GSPGSSPSASTGTGPGASPGTSSTGSPGTSESATPESGPGTSTEPSEGSAPGTSTEPS | |
| | EGSAPGGASASKAPSTGGMAEPAGSPTSTEEGASPGTSSTGSPGSSTPSGATGSPG | |
| | SSTPSGATGSPG | |
| Seg 169 | GTSESATPESGPGSEPATSGSETPGTSESATPESGPGSEPATSGSETPGTSESATPES | 361 |
| | GPGTSTEPSEGSAPGSPAGSPTSTEEGTSESATPESGPGSEPATSGSETPGTSESATP | |
| | ESGPGSPAGSPTSTEEGSPAGSPTSTEEGTSTEPSEGSAPGTSESATPESGPGTSESA | |
| | TPESGPGTSESATPESGPGSEPATSGSETPGSEPATSGSETPGSPAGSPTSTEEGTST | |
| | EPSEGSAPGTSTEPSEGSAPGSEPATSGSETPGTSESATPESGPGTSTEPSEGSAPGG | |
| | GSPAGSCTSPGGTSESATPESGPGSEPATSGSETPGTSESATPESGPGSEPATSGSET | |
| | PGTSESATPESGPGTSTEPSEGSAPGSPAGSPTSTEEGTSESATPESGPGSEPATSGS | |
| | ETPGTSESATPESGPGSPAGSPTSTEEGSPAGSPTSTEEGTSTEPSEGSAPGTSESAT | |
| | PESGPGTSESATPESGPGTSESATPESGPGSEPATSGSETPGSEPATSGSETPGSPAG | |
| | SPTSTEEGTSTEPSEGSAPGTSTEPSEGSAPGSEPATSGSETPGTSESATPESGPGTST | |
| | EPSEGSAPGGGSPAGSKTSPGGTSESATPESGPGSEPATSGSETPGTSESATPESGPG | |
| | SEPATSGSETPGTSESATPESGPGTSTEPSEGSAPGSPAGSPTSTEEGTSESATPESGP | |
| | GSEPATSGSETPGTSESATPESGPGSPAGSPTSTEEGSPAGSPTSTEEGTSTEPSEGS | |
| | APGTSESATPESGPGTSESATPESGPGTSESATPESGPGSEPATSGSETPGSEPATSG | |
| | SETPGSPAGSPTSTEEGTSTEPSEGSAPGTSTEPSEGSAPGSEPATSGSETPGTSESA | |
| | TPESGPGTSTEPSEGSAPG | |
| Seg 170 | MAEPAGSPTSTEEGTPGSGTASSSPGSSTPSGATGSPGASPGTSSTGSPGGGSPAGS | 362 |
| | CTSPGGSEPATSGSETPGTSESATPESGPGSEPATSGSETPGSPAGSPTSTEEGTSTE | |
| | PSEGSAPGSEPATSGSETPGSEPATSGSETPGSEPATSGSETPGTSTEPSEGSAPGTS | |
| | ESATPESGPGSEPATSGSETPGTSTEPSEGSAPGGGSPAGSCTSPGSEPATSGSETPG | |
| | TSESATPESGPGSEPATSGSETPGSPAGSPTSTEEGTSTEPSEGSAPGSEPATSGSETP | |
| | GSEPATSGSETPGSEPATSGSETPGTSTEPSEGSAPGTSESATPESGPGSEPATSGSE | |
| | TPGTSTEPSEGSAPGGGSPAGSCTSPGGSEPATSGSETPGTSESATPESGPGSEPATS | |
| | GSETPGSPAGSPTSTEEGTSTEPSEGSAPGSEPATSGSETPGSEPATSGSETPGSEPA | |
| | TSGSETPGTSTEPSEGSAPGTSESATPESGPGSEPATSGSETPGTSTEPSEGSAPGGG | |
| | SPAGSCTSPGGSEPATSGSETPGTSESATPESGPGSEPATSGSETPGSPAGSPTSTEE | |
| | GTSTEPSEGSAPGSEPATSGSETPGSEPATSGSETPGSEPATSGSETPGTSTEPSEGS | |
| | APGTSESATPESGPGSEPATSGSETPGTSTEPSEGSAPG | |
| Seg 171 | MAEPAGSPTSTEEGTPGSGTASSSPGSSTPSGATGSPGASPGTSSTGSPGGGSPAGS | 363 |
| | KTSPGGSEPATSGSETPGTSESATPESGPGSEPATSGSETPGSPAGSPTSTEEGTSTE | |
| | PSEGSAPGSEPATSGSETPGSEPATSGSETPGSEPATSGSETPGTSTEPSEGSAPGTS | |
| | ESATPESGPGSEPATSGSETPGTSTEPSEGSAPGGGSPAGSKTSPGSEPATSGSETPG | |
| | TSESATPESGPGSEPATSGSETPGSPAGSPTSTEEGTSTEPSEGSAPGSEPATSGSETP | |
| | GSEPATSGSETPGSEPATSGSETPGTSTEPSEGSAPGTSESATPESGPGSEPATSGSE | |
| | TPGTSTEPSEGSAPGGGSPAGSKTSPGGSEPATSGSETPGTSESATPESGPGSEPATS | |
| | GSETPGSPAGSPTSTEEGTSTEPSEGSAPGSEPATSGSETPGSEPATSGSETPGSEPA | |
| | TSGSETPGTSTEPSEGSAPGTSESATPESGPGSEPATSGSETPGTSTEPSEGSAPGGG | |
| | SPAGSKTSPGGSEPATSGSETPGTSESATPESGPGSEPATSGSETPGSPAGSPTSTEE | |
| | GTSTEPSEGSAPGSEPATSGSETPGSEPATSGSETPGSEPATSGSETPGTSTEPSEGS | |
| | APGTSESATPESGPGSEPATSGSETPGTSTEPSEGSAPG | |
| Seg 172 | SAGSPTAEAAGCGTAEAAGTSESATPESGPGSEPATSGSETPGTSESATPESGPGTS | 364 |
| | TEPSEGSAPGTSESATPESGPGSPAGSPTSTEEGSPAGSPTSTEEGSPAGSPTSTEEG | |
| | TSESATPESGPGTSTEPSEGSAPGTSESATPESGPGSEPATSGSETPGTSESATPESGP | |
| | GSEPATSGSETPGTSESATPESGPGTSTEPSEGSAPTAEAAGCGTAEAAGSPAGSPT | |
| | STEEGTSESATPESGPGSEPATSGSETPGTSESATPESGPGSPAGSPTSTEEGSPAGS | |
| | PTSTEEGTSTEPSEGSAPGTSESATPESGPGTSESATPESGPGTSESATPESGPGSEP | |
| | ATSGSETPGSEPATSGSETPGSPAGSPTSTEEGTSTEPSEGSAPGTSTEPSEGSAPGS | |
| | EPATSGSETPTAEAAGCGTAEAASASR | |
| Seg 173 | SAGSPGSPTSTEEGTSESATPESGPGTSTEPSEGSAPGSPAGSPTSTEEGTSTEPSEGS | 365 |
| | APGTSTEPSEGSAPGTSESATPESGPGSEPATSGSETPGSEPATSGSETPGSPAGSPT | |
| | STEEGTSESATPESGPGTSTEPSEGSAGPTKPGTSTEPSEGSAPGSPAGSPTSTEEGT | |
| | STEPSEGSAPGTSTEPSEGSAPGTSESATPESGPGTSTEPSEGSAPGTSESATPESGP | |
| | GSEPATSGSETPGTSTEPSEGSAPGTSTEPSEGSAPGTSESATPESGPGTSESATPES | |
| | GPTKPGTSPTSTEEGTSESATPESGPGSEPATSGSETPGTSESATPESGPGTSTEPSE | |
| | GSAPGTSTEPSEGSAPGTSTEPSEGSAPGTSTEPSEGSAPGTSTEPSEGSAPGTSTEP | |
| | SEGSAPGSPAGSPTSTEEGTSTEPSEGSAPTAEAAGCGTAEAAGTSESATPESGPGS | |
| | EPATSGSETPGTSESATPESGPGTSTEPSEGSAPGTSESATPESGPGSPAGSPTSTEE | |
| | GSPAGSPTSTEEGSPAGSPTSTEEGTSESATPESGPGTSTEPSEGSAPGTSESATPES | |
| | GPGSEPATSGSETPGTSESATPESGPGSEPATSGSETPGTSESATPESGPGTSTEPSE | |
| | GSAPTAEAAGCGTAEAAGSPAGSPTSTEEGTSESATPESGPGSEPATSGSETPGTSE | |
| | SATPESGPGSPAGSPTSTEEGSPAGSPTSTEEGTSTEPSEGSAPGTSESATPESGPGT | |
| | SESATPESGPGTSESATPESGPGSEPATSGSETPGSEPATSGSETPGSPAGSPTSTEE | |
| | GTSTEPSEGSAPGTSTEPSEGSAPGSEPATSGSETPTAEAAGCGTAEAASASR | |
| Seg 174 | SAGSPTAEAAGCGTAEAAGSPAGSPTSTEEGTSESATPESGPGTSTEPSEGSAPGSP | 366 |
| | AGSPTSTEEGTSTEPSEGSAPGTSTEPSEGSAPGTSESATPESGPGSEPATSGSETPG | |
| | SEPATSGSETPGSPAGSPTSTEEGTSESATPESGPGTSTEPSEGSAPGTSTEPSEGSAP | |
| | GSPAGSPTSTEEGTSTEPSEGSAPGTSTEPSEGSAPGTSESATPESGPGTSTEPSEGS | |
| | APGTSESATPESGPGSEPATSGSETPGTSTEPSEGSAPGTSTEPSEGSAPGTSESATP | |
| | ESGPGTSESATPESGPGSPAGSPTSTEEGTSESATPESGPGSEPATSGSETPGTSESA | |
| | TPESGPGTSTEPSEGSAPGTSTEPSEGSAPGTSTEPSEGSAPGTSTEPSEGSAPGTST | |
| | EPSEGSAPGTSTEPSEGSAPGSPAGSPTSTEEGTSTEPSEGSAPTAEAAGCGTAEAA | |
| | GTSESATPESGPGSEPATSGSETPGTSESATPESGPGSEPATSGSETPGTSESATPES | |
| | GPGTSTEPSEGSAPGTSESATPESGPGSPAGSPTSTEEGSPAGSPTSTEEGSPAGSPT | |
| | STEEGTSESATPESGPGTSTEPSEGSAPGTSESATPESGPGSEPATSGSETPGTSESA | |
| | TPESGPGSEPATSGSETPGTSESATPESGPGTSTEPSEGSAPGSPAGSPTSTEEGTSES | |
| | ATPESGPGSEPATSGSETPGTSESATPESGPGSPAGSPTSTEEGSPAGSPTSTEEGTS | |
| | TEPSEGSAPGTSESATPESGPGTSESATPESGPGTSESATPESGPGSEPATSGSETPG | |
| | SEPATSGSETPGSPAGSPTSTEEGTSTEPSEGSAPGTSTEPSEGSAPGSEPATSGSETP | |
| | GTSESATPESGPGTSTEPSEGSAPTAEAAGCGTAEAASASR | |
| Seg 175 | SAGSPGSPAGSPTSTEEGTSESATPESGPGTSTEPSEGSAPGSPAGSPTSTEEGTSTE | 367 |
| | PSEGSAPGTSTEPSEGSAPGTSESATPESGPGSEPATSGSETPGSEPATSGSETPGSP | |
| | AGSPTSTEEGTSESATPESGPGTSTEPSEGSAPGTSTEPSEGSAPGSPAGSPTSTEEG | |
| | TSTEPSEGSAPGTSTEPSEGSAPGTSESATPESGPGTSTEPSEGSAPGTSESATPESGP | |
| | GSEPATSGSETPGTSTEPSEGSAPGTSTEPSEGSAPGTSESATPESGPGTSESATPES | |
| | GPGSPAGSPTSTEEGTSESATPESGPGSEPATSGSETPGTSESATPESGPGTSTEPSE | |
| | GSAPGTSTEPSEGSAPGTSTEPSEGSAPGTSTEPSEGSAPGTSTEPSEGSAPGTSTEP | |
| | SEGSAPGSPAGSPTSTEEGTSTEPSEGSAPTAEAAGCGTAEAAPGSEPATSGSETPG | |
| | TSESATPESGPGSEPATSGSETPGTAEAAGCGTAEAASTEPSEGSAPGTSESATPES | |
| | GPGSPAGSPTSTEEGSPATAEAAGCGTAEAASPTSTEEGTSESATPESGPGTSTEPS | |
| | EGSAPGTSESATTAEAAGCGTAEAASETPGTSESATPESGPGSEPATSGSETPGTSE | |
| | SATPESGTAEAAGCGTAEAAGSPAGSPTSTEEGTSESATPESGPGSEPATSGSETPG | |
| | TTAEAAGCGTAEAAAGSPTSTEEGSPAGSPTSTEEGTSTEPSEGSAPGTSESTAEA | |
| | AGCGTAEAATPESGPGTSESATPESGPGSEPATSGSETPGSEPATSGTAEAAGCGT | |
| | AEAATEEGTSTEPSEGSAPGTSTEPSEGSAPGSEPATSGSETPTAEAAGCGTAEAAS | |
| | ASR | |
| Seg 176 | SAGSPTAEAAGCGTAEAAGTSESATPESGPGSEPATSGSETPGTSESATPESGPGTS | 368 |
| | TEPSEGSAPGTSESATPESGPGSPAGSPTSTEEGSPAGSPTSTEEGSPAGSPTSTEEG | |
| | TSESATPESGPGTSTEPSEGSAPGTSESATPESGPGSEPATSGSETPGTSESATPESGP | |
| | GSEPATSGSETPGTSESATPESGPGTSTEPSEGSAPTAEAAGCGTAEAAGSPAGSPT | |
| | STEEGTSESATPESGPGSEPATSGSETPGTSESATPESGPGSPAGSPTSTEEGSPAGS | |
| | PTSTEEGTSTEPSEGSAPGTSESATPESGPGTSESATPESGPGTSESATPESGPGSEP | |
| | ATSGSETPGSEPATSGSETPGSPAGSPTSTEEGTSTEPSEGSAPGTSTEPSEGSAPGS | |
| | EPATSGSETPTAEAAGCGTAEAASASR | |
| Seg 177 | SAGSPTAEAAGCGTAEAAPGSEPATSGSETPGTSESATPESGPGSEPATSGSETPGT | 369 |
| | AEAAGCGTAEAASTEPSEGSAPGTSESATPESGPGSPAGSPTSTEEGSPATAEAAG | |
| | CGTAEAASPTSTEEGTSESATPESGPGTSTEPSEGSAPGTSESATTAEAAGCGTAEA | |
| | ASETPGTSESATPESGPGSEPATSGSETPGTSESATPESGTAEAAGCGTAEAAGSPA | |
| | GSPTSTEEGTSESATPESGPGSEPATSGSETPGTTAEAAGCGTAEAAAGSPTSTEEG | |
| | SPAGSPTSTEEGTSTEPSEGSAPGTSESTAEAAGCGTAEAATPESGPGTSESATPES | |
| | GPGSEPATSGSETPGSEPATSGTAEAAGCGTAEAATEEGTSTEPSEGSAPGTSTEPS | |
| | EGSAPGSEPATSGSETPTAEAAGCGTAEAASASR | |
| Seg 178 | SAGSPTGPGSEPATSGSETPGTSESATPESGPGSEPATSGSETPGTSESATPESGPGT | 370 |
| | STEPSEGSAPGSPAGSPTSTEEGTSESATPESGPGSEPATSGSETPGTSESATPESGP | |
| | GSPAGSPTSTEEGSPAGSPTSTEEGTSTEPSEGSAPGTSESATPESGPGTSESATPES | |
| | GPGTSESATPESGPGSEPATSGSETPGSEPATSGSETPGSPAGSPTSTEEGTSTEPSE | |
| | GSAPGTSTEPSEGSAPGSEPATSGSETPGTSESATPESGPGTSTEPSEGSAPSASR | |
| Seg 179 | GSPGSPAGSPTSTEEGTSESATPESGPGTSTEPSEGSAPGSPAGSPTSTEEGTSTEPSE | 371 |
| | GSAPGTSTEPSEGSAPGTSESATPESGPGSEPATSGSETPGSEPATSGSETPGSPAGS | |
| | PTSTEEGTSESATPESGPGTSTEPSEGSAPGTSTEPSEGSAPGSPAGSPTSTEEGTSTE | |
| | PSEGSAPGTSTEPSEGSAPGTSESATPESGPGTSTEPSEGSAPGTSESATPESGPGSE | |
| | PATSGSETPGTSTEPSEGSAPGTSTEPSEGSAPGTSESATPESGPGTSESATPESGPG | |
| | SPAGSPTSTEEGTSESATPESGPGSEPATSGSETPGTSESATPESGPGTSTEPSEGSAP | |
| | GTSTEPSEGSAPGTSTEPSEGSAPGTSTEPSEGSAPGTSTEPSEGSAPGTSTEPSEGS | |
| | APGSPAGSPTSTEEGTSTEPSEGSAPGTSESATPESGPGSEPATSGSETPGTSESATP | |
| | ESGPGSEPATSGSETPGTSESATPESGPGTSTEPSEGSAPGTSESATPESGPGSPAGS | |
| | PTSTEEGSPAGSPTSTEEGSPAGSPTSTEEGTSESATPESGPGTSTEPSEGSAPGTSES | |
| | ATPESGPGSEPATSGSETPGTSESATPESGPGSEPATSGSETPGTSESATPESGPGTS | |
| | TEPSEGSAPGSPAGSPTSTEEGTSESATPESGPGSEPATSGSETPGTSESATPESGPG | |
| | SPAGSPTSTEEGSPAGSPTSTEEGTSTEPSEGSAPGTSESATPESGPGTSESATPESGP | |
| | GTSESATPESGPGSEPATSGSETPGSEPATSGSETPGSPAGSPTSTEEGTSTEPSEGS | |
| | APGTSTEPSEGSAPGSEPATSGSETPGTSESATPESGPGTSTEPSEGSAPGR | |
| Seg 180 | GSPGSPAGSPTSTEEGTSESATPESGPGTSTEPSEGSAPGSPAGSPTSTEEGTSTEPSE | 372 |
| | GSAPGTSTEPSEGSAPGTSESATPESGPGSEPATSGSETPGSEPATSGSETPGSPAGS | |
| | PTSTEEGTSESATPESGPGTSTEPSEGSAPGTSTEPSEGSAPGSPAGSPTSTEEGTSTE | |
| | PSEGSAPGTSTEPSEGSAPGTSESATPESGPGTSTEPSEGSAPGTSESATPESGPGSE | |
| | PATSGSETPGTSTEPSEGSAPGTSTEPSEGSAPGTSESATPESGPGTSESATPESGPG | |
| | SPAGSPTSTEEGTSESATPESGPGSEPATSGSETPGTSESATPESGPGTSTEPSEGSAP | |
| | GTSTEPSEGSAPGTSTEPSEGSAPGTSTEPSEGSAPGTSTEPSEGSAPGTSTEPSEGS | |
| | APGSPAGSPTSTEEGTSTEPSEGSAPTAEAAGKPGTAEAAGTSESATPESGPGSEPA | |
| | TSGSETPGTSESATPESGPGSEPATSGSETPGTSESATPESGPGTSTEPSEGSAPGTS | |
| | ESATPESGPGSPAGSPTSTEEGSPAGSPTSTEEGSPAGSPTSTEEGTSESATPESGPG | |
| | TSTEPSEGSAPGTSESATPESGPGSEPATSGSETPGTSESATPESGPGSEPATSGSETP | |
| | GTSESATPESGPGTSTEPSEGSAPGSPAGSPTSTEEGTSESATPESGPGSEPATSGSE | |
| | TPGTSESATPESGPGSPAGSPTSTEEGSPAGSPTSTEEGTSTEPSEGSAPGTSESATP | |
| | ESGPGTSESATPESGPGTSESATPESGPGSEPATSGSETPGSEPATSGSETPGSPAGS | |
| | PTSTEEGTSTEPSEGSAPGTSTEPSEGSAPGSEPATSGSETPGTSESATPESGPGTSTE | |
| | PSEGSAPGK | |
| Seg 181 | SAGSPTAEAAGCGTAEAAGSPAGSPTSTEEGTSESATPESGPGTSTEPSEGSAPGSP | 373 |
| | AGSPTSTEEGTSTEPSEGSAPGTSTEPSEGSAPGTSESATPESGPGSEPATSGSETPG | |
| | SEPATSGSETPGSPAGSPTSTEEGTSESATPESGPGTSTEPSEGSAPGTSTEPSEGSAP | |
| | GSPAGSPTSTEEGTSTEPSEGSAPGTSTEPSEGSAPGTSESATPESGPGTSTEPSEGS | |
| | APGTSESATPESGPGSEPATSGSETPGTSTEPSEGSAPGTSTEPSEGSAPGTSESATP | |
| | ESGPGTSESATPESGPGSPAGSPTSTEEGTSESATPESGPGSEPATSGSETPGTSESA | |
| | TPESGPGTSTEPSEGSAPGTSTEPSEGSAPGTSTEPSEGSAPGTSTEPSEGSAPGTST | |
| | EPSEGSAPGTSTEPSEGSAPGSPAGSPTSTEEGTSTEPSEGSAPGTSESATPESGPGS | |
| | EPATSGSETPGTSESATPESGPGSEPATSGSETPGTSESATPESGPGTSTEPSEGSAP | |
| | GTSESATPESGPGSPAGSPTSTEEGSPAGSPTSTEEGSPAGSPTSTEEGTSESATPES | |
| | GPGTSTEPSEGSAPGTSESATPESGPGSEPATSGSETPGTSESATPESGPGSEPATSG | |
| | SETPGTSESATPESGPGTSTEPSEGSAPGSPAGSPTSTEEGTSESATPESGPGSEPATS | |
| | GSETPGTSESATPESGPGSPAGSPTSTEEGSPAGSPTSTEEGTSTEPSEGSAPGTSES | |
| | ATPESGPGTSESATPESGPGTSESATPESGPGSEPATSGSETPGSEPATSGSETPGSP | |
| | AGSPTSTEEGTSTEPSEGSAPGTSTEPSEGSAPGSEPATSGSETPGTSESATPESGPG | |
| | TSTEPSEGSAPSASR | |
| Seg 182 | CGSPGSPAGSPTSTEEGTSESATPESGPGTSTEPSEGSAPGSPAGSPTSTEEGTSTEP | 374 |
| | SEGSAPGTSTEPSEGSAPGTSESATPESGPGSEPATSGSETPGSEPATSGSETPGSPA | |
| | GSPTSTEEGTSESATPESGPGTSTEPSEGSAPGTSTEPSEGSAPGSPAGSPTSTEEGT | |
| | STEPSEGSAPGTSTEPSEGSAPGTSESATPESGPGTSTEPSEGSAPGTSESATPESGP | |
| | GSEPATSGSETPGTSTEPSEGSAPGTSTEPSEGSAPGTSESATPESGPGTSESATPES | |
| | GPGSPAGSPTSTEEGTSESATPESGPGSEPATSGSETPGTSESATPESGPGTSTEPSE | |
| | GSAPGTSTEPSEGSAPGTSTEPSEGSAPGTSTEPSEGSAPGTSTEPSEGSAPGTSTEP | |
| | SEGSAPGSPAGSPTSTEEGTSTEPSEGSAPGTSESATPESGPGSEPATSGSETPGTSE | |
| | SATPESGPGSEPATSGSETPGTSESATPESGPGTSTEPSEGSAPGTSESATPESGPGS | |
| | PAGSPTSTEEGSPAGSPTSTEEGSPAGSPTSTEEGTSESATPESGPGTSTEPSEGSAP | |
| | GTSESATPESGPGSEPATSGSETPGTSESATPESGPGSEPATSGSETPGTSESATPES | |
| | GPGTSTEPSEGSAPGSPAGSPTSTEEGTSESATPESGPGSEPATSGSETPGTSESATP | |
| | ESGPGSPAGSPTSTEEGSPAGSPTSTEEGTSTEPSEGSAPGTSESATPESGPGTSESA | |
| | TPESGPGTSESATPESGPGSEPATSGSETPGSEPATSGSETPGSPAGSPTSTEEGTST | |
| | EPSEGSAPGTSTEPSEGSAPGSEPATSGSETPGTSESATPESGPGTSTEPSEGSAPGR | |
| Seg 183 | MKNPEQAEEQAEEQREETRPRPRPRPRPRPRPRPRPRPRPSASRSAGSPTGPGSEPA | 375 |
| | TSGSETPGTSESATPESGPGSEPATSGSETPGTSESATPESGPGTSTEPSEGSAPGSP | |
| | AGSPTSTEEGTSESATPESGPGSEPATSGSETPGTSESATPESGPGSPAGSPTSTEEG | |
| | SPAGSPTSTEEGTSTEPSEGSAPGTSESATPESGPGTSESATPESGPGTSESATPESGP | |
| | GSEPATSGSETPGSEPATSGSETPGSPAGSPTSTEEGTSTEPSEGSAPGTSTEPSEGS | |
| | APGSEPATSGSETPGTSESATPESGPGTSTEPSEGSAPSASRSAHHHHHHHH | |
| Seg 184 | MKNPEQAEEQAEEQREETRPRPRPRPRPRPRPRPRPRPRPSASRSAGSPTAEAAGC | 376 |
| | GTAEAAPGSEPATSGSETPGTSESATPESGPGSEPATSGSETPGTAEAAGCGTAEA | |
| | ASTEPSEGSAPGTSESATPESGPGSPAGSPTSTEEGSPATAEAAGCGTAEAASPTST | |
| | EEGTSESATPESGPGTSTEPSEGSAPGTSESATTAEAAGCGTAEAASETPGTSESAT | |
| | PESGPGSEPATSGSETPGTSESATPESGTAEAAGCGTAEAAGSPAGSPTSTEEGTSE | |
| | SATPESGPGSEPATSGSETPGTTAEAAGCGTAEAAAGSPTSTEEGSPAGSPTSTEEG | |
| | TSTEPSEGSAPGTSESTAEAAGCGTAEAATPESGPGTSESATPESGPGSEPATSGSE | |
| | TPGSEPATSGTAEAAGCGTAEAATEEGTSTEPSEGSAPGTSTEPSEGSAPGSEPATS | |
| | GSETPTAEAAGCGTAEAASASRSAHHHHHHHH | |
| Seg 185 | MKNPEQAEEQAEEQREETRPRPRPRPRPRPRPRPRPRPRPSASRSAGSPGSPAGSPT | 377 |
| | STEEGTSESATPESGPGTSTEPSEGSAPGSPAGSPTSTEEGTSTEPSEGSAPGTSTEPS | |
| | EGSAPGTSESATPESGPGSEPATSGSETPGSEPATSGSETPGSPAGSPTSTEEGTSES | |
| | ATPESGPGTSTEPSEGSAPGTSTEPSEGSAPGSPAGSPTSTEEGTSTEPSEGSAPGTS | |
| | TEPSEGSAPGTSESATPESGPGTSTEPSEGSAPGTSESATPESGPGSEPATSGSETPG | |
| | TSTEPSEGSAPGTSTEPSEGSAPGTSESATPESGPGTSESATPESGPGSPAGSPTSTEE | |
| | GTSESATPESGPGSEPATSGSETPGTSESATPESGPGTSTEPSEGSAPGTSTEPSEGS | |
| | APGTSTEPSEGSAPGTSTEPSEGSAPGTSTEPSEGSAPGTSTEPSEGSAPGSPAGSPT | |
| | STEEGTSTEPSEGSAPTAEAAGCGTAEAAPGSEPATSGSETPGTSESATPESGPGSE | |
| | PATSGSETPGTAEAAGCGTAEAASTEPSEGSAPGTSESATPESGPGSPAGSPTSTEE | |
| | GSPATAEAAGCGTAEAASPTSTEEGTSESATPESGPGTSTEPSEGSAPGTSESATTA | |
| | EAAGCGTAEAASETPGTSESATPESGPGSEPATSGSETPGTSESATPESGTAEAAG | |
| | CGTAEAAGSPAGSPTSTEEGTSESATPESGPGSEPATSGSETPGTTAEAAGCGTAE | |
| | AAAGSPTSTEEGSPAGSPTSTEEGTSTEPSEGSAPGTSESTAEAAGCGTAEAATPES | |
| | GPGTSESATPESGPGSEPATSGSETPGSEPATSGTAEAAGCGTAEAATEEGTSTEPS | |
| | EGSAPGTSTEPSEGSAPGSEPATSGSETPTAEAAGCGTAEAASASRSAHHHHHHH | |
| | H | |
| Seg 186 | GSPGSPAGSPTSTEEGTSESATPESGPGTSTEPSEGSAPGSPAGSPTSTEEGTSTEPSE | 378 |
| | GSAPGTSTEPSEGSAPGTSESATPESGPGSEPATSGSETPGSEPATSGSETPGSPAGS | |
| | PTSTEEGTSESATPESGPGTSTEPSEGSAPGTSTEPSEGSAPGSPAGSPTSTEEGTSTE | |
| | PSEGSAPGTSTEPSEGSAPGTSESATPESGPGTSTEPSEGSAPGTSESATPESGPGSE | |
| | PATSGSETPGTSTEPSEGSAPGTSTEPSEGSAPGTSESATPESGPGTSESATPESGPG | |
| | SPAGSPTSTEEGTSESATPESGPGSEPATSGSETPGTSESATPESGPGTSTEPSEGSAP | |
| | GTSTEPSEGSAPGTSTEPSEGSAPGTSTEPSEGSAPGTSTEPSEGSAPGTSTEPSEGS | |
| | APGSPAGSPTSTEEGTSTEPSEGSAPTAEAAGKPGTAEAAGTSESATPESGPGSEPA | |
| | TSGSETPGTSESATPESGPGSEPATSGSETPGTSESATPESGPGTSTEPSEGSAPGTS | |
| | ESATPESGPGSPAGSPTSTEEGSPAGSPTSTEEGSPAGSPTSTEEGTSESATPESGPG | |
| | TSTEPSEGSAPGTSESATPESGPGSEPATSGSETPGTSESATPESGPGSEPATSGSETP | |
| | GTSESATPESGPGTSTEPSEGSAPGSPAGSPTSTEEGTSESATPESGPGSEPATSGSE | |
| | TPGTSESATPESGPGSPAGSPTSTEEGSPAGSPTSTEEGTSTEPSEGSAPGTSESATP | |
| | ESGPGTSESATPESGPGTSESATPESGPGSEPATSGSETPGSEPATSGSETPGSPAGS | |
| | PTSTEEGTSTEPSEGSAPGTSTEPSEGSAPGSEPATSGSETPGTSESATPESGPGTSTE | |
| | PSEGSAPGK | |
| Seg 187 | SAGSPTAEAAGCGTAEAAGSPAGSPTSTEEGTSESATPESGPGTSTEPSEGSAPGSP | 379 |
| | AGSPTSTEEGTSTEPSEGSAPGTSTEPSEGSAPGTSESATPESGPGSEPATSGSETPG | |
| | SEPATSGSETPGSPAGSPTSTEEGTSESATPESGPGTSTEPSEGSAPGTSTEPSEGSAP | |
| | GSPAGSPTSTEEGTSTEPSEGSAPGTSTEPSEGSAPGTSESATPESGPGTSTEPSEGS | |
| | APGTSESATPESGPGSEPATSGSETPGTSTEPSEGSAPGTSTEPSEGSAPGTSESATP | |
| | ESGPGTSESATPESGPGSPAGSPTSTEEGTSESATPESGPGSEPATSGSETPGTSESA | |
| | TPESGPGTSTEPSEGSAPGTSTEPSEGSAPGTSTEPSEGSAPGTSTEPSEGSAPGTST | |
| | EPSEGSAPGTSTEPSEGSAPGSPAGSPTSTEEGTSTEPSEGSAPGTSESATPESGPGS | |
| | EPATSGSETPGTSESATPESGPGSEPATSGSETPGTSESATPESGPGTSTEPSEGSAP | |
| | GTSESATPESGPGSPAGSPTSTEEGSPAGSPTSTEEGSPAGSPTSTEEGTSESATPES | |
| | GPGTSTEPSEGSAPGTSESATPESGPGSEPATSGSETPGTSESATPESGPGSEPATSG | |
| | SETPGTSESATPESGPGTSTEPSEGSAPGSPAGSPTSTEEGTSESATPESGPGSEPATS | |
| | GSETPGTSESATPESGPGSPAGSPTSTEEGSPAGSPTSTEEGTSTEPSEGSAPGTSES | |
| | ATPESGPGTSESATPESGPGTSESATPESGPGSEPATSGSETPGSEPATSGSETPGSP | |
| | AGSPTSTEEGTSTEPSEGSAPGTSTEPSEGSAPGSEPATSGSETPGTSESATPESGPG | |
| | TSTEPSEGSAPSASR | |
| Seg 188 | SAGSPTEGTSTEPSEGSAPGTSESTAEAAGCGTAEAATPESGPGTSESATPESGPGS | 380 |
| | EPATSGSETPGSEPATSGTAEAAGCGTAEAATEEGTSTEPSEGSAPGTSTEPSEGSA | |
| | PGSEPATSGSETPTAEAAGCGTAEAASASR | |
| Seg 189 | SAGSPTPGTSESATPESGPGSEPATSGSETPGTSESATPESGPGSEPATSGSETPGTS | 381 |
| | ESATPESGPGTSTEPSEGSAPGTSESATPESGPGSPAGSPTSTEEGSPAGSPTSTEEG | |
| | SPAGSPTSTEEGTSESATPESGPGTSTEPSEGSAPGTSESATPESGPGSEPATSGSETP | |
| | GTSESATPESGPGSEPATSGSETPGTSESATPESGPGTSTEPSEGSAPGSPAGSPTST | |
| | EEGTSESATPESGPGSEPATSGSETPGTSESATPESGPGSPAGSPTSTEEGSPAGSPT | |
| | STEEGTSTEPSEGSAPGTSESATPESGPGTSESATPESGPGTSESATPESGPGSEPAT | |
| | SGSETPGSEPATSGSETPGSPAGSPTSTEEGTSTEPSEGSAPGTSTEPSEGSAPGSEP | |
| | ATSGSETPTAEAAGCGTAEAASASR | |
| Seg 190 | SAGSPTGSEPATSGSETPGTSESATPESGPGSEPATSGSETPGTSESATPESGPGTST | 382 |
| | EPSEGSAPGTSESATPESGPGSPAGSPTSTEEGSPAGSPTSTEEGSPAGSPTSTEEGT | |
| | SESATPESGPGTSTEPSEGSAPGTSESATPESGPGSEPATSGSETPGTSESATPESGP | |
| | GSEPATSGSETPGTSESATPESGPGTSTEPSEGSAPTAEAAGCGTAEAAGSPAGSPT | |
| | STEEGTSESATPESGPGSEPATSGSETPGTSESATPESGPGSPAGSPTSTEEGSPAGS | |
| | PTSTEEGTSTEPSEGSAPGTSESTAEAAGCGTAEAATPESGPGTSESATPESGPGSE | |
| | PATSGSETPGSEPATSGSETPGSPAGSPTSTEEGTSTEPSEGSAPGTSTEPSEGSAPG | |
| | SEPATSGSETPTAEAAGCGTAEAASASR | |
| Seg 191 | SAGSPTPGTSESATPESGPGSEPATSGSETPGTSESATPESGPGSEPATSGSETPGTS | 383 |
| | ESATPESGPGTSTEPSEGSAPGTSESATPESGPGSPAGSPTSTEEGSPAGSPTSTEEG | |
| | SPAGSPTSTEEGTSESATPESGPGTSTEPSEGSAPGTSESATPESGPGSEPATSGSETP | |
| | GTSESATPESGPGSEPATSGSETPGTSESATPESGPGTSTEPSEGSAPGSPAGSPTST | |
| | EEGTSESATPESGPGSEPATSGSETPGTSESATPESGPGSPAGSPTSTEEGSPAGSPT | |
| | STEEGTSTEPSEGSAPGTSESTAEAAGCGTAEAATPESGPGTSESATPESGPGSEPA | |
| | TSGSETPGSEPATSGTAEAAGCGTAEAATEEGTSTEPSEGSAPGTSTEPSEGSAPGS | |
| | EPATSGSETPTAEAAGCGTAEAASASR | |
| Seg 192 | SAGSPGSTSSTAESPGPGSTSSTAESPGPGCTSESPSGTAPGSTSSTAESPGPGSTSST | 384 |
| | AESPGPGTSTPESGSASPGSTSCSPSGEAPGTSPSGESSTAPGSTSESPSGTAPGSTSE | |
| | SPSGTAPETSPSGESCTAPGSTSASR | |
| Seg 193 | SAGSPGTPGSGTASSSPGSSTPSGATGSPGCAGSGTASSSPGSSTPSGATGSPGTPG | 385 |
| | SGTASSSPGSSTPSGATGSPGSSTCSGATGSPGSSPSASTGTGPGSSPSASTGTGPGA | |
| | SPGTSSTGSPGTPGSGTACSSPGSSSASR | |
| Seg 194 | SAGSPGSPAGSPTSTEEGTSESATPESGPGTSTEPSEGSAPGSPAGSPTSTEEGTSTE | 386 |
| | PSEGSAPGTSTEPSEGSAPGTSESATPESGPGSEPATSGSETPGSEPATSGSETPGSP | |
| | AGSPTSTEEGTSESATPESGPGTSTEPSEGSAPGTSTEPSEGSAPGSPAGSPTSTEEG | |
| | TSTEPSEGSAPGTSTEPSEGSAPGTSESATPESGPGTSTEPSEGSAPGTSESATPESGP | |
| | GSEPATSGSETPGTSTEPSEGSAPGTSTEPSEGSAPGTSESATPESGPGTSESATPES | |
| | GPGSPAGSPTSTEEGTSESATPESGPGSEPATSGSETPGTSESATPESGPGTSTEPSE | |
| | GSAPGTSTEPSEGSAPGTSTEPSEGSAPGTSTEPSEGSAPGTSTEPSEGSAPGTSTEP | |
| | SEGSAPGSPAGSPTSTEEGTSTEPSEGSAPGTSESATPESGPGSEPATSGSETPGTSE | |
| | SATPESGPGSEPATSGSETPGTSESATPESGPGTSTEPSEGSAPGTSESATPESGPGS | |
| | PAGSPTSTEEGSPAGSPTSTEEGSPAGSPTSTEEGTSESATPESGPGTSTEPSEGSAP | |
| | GTSESATPESGPGSEPATSGSETPGTSESATPESGPGSEPATSGSETPGTSESATPES | |
| | GPGTSTEPSEGSAPGSPAGSPTSTEEGTSESATPESGPGSEPATSGSETPGTSESATP | |
| | ESGPGSPAGSPTSTEEGSPAGSPTSTEEGTSTEPSEGSAPGTSESATPESGPGTSESA | |
| | TPESGPGTSESATPESGPGSEPATSGSETPGSEPATSGSETPGSPAGSPTSTEEGTST | |
| | EPSEGSAPGTSTEPSEGSAPGSEPATSGSETPGTSESATPESGPGTESASK | |
| Seg 195 | SAGSPTGPGSEPATSGSETPGTSESATPESGPGSEPATSGSETPGTSESATPESGPGT | 387 |
| | STEPSEGSAPGSPAGSPTSTEEGTSESATPESGPGSEPATSGSETPGTSESATPESGP | |
| | GSPAGSPTSTEEGSPAGSPTSTEEGTSTEPSEGSAPGTSESATPESGPGTSESATPES | |
| | GPGTSESATPESGPGSEPATSGSETPGSEPATSGSETPGSPAGSPTSTEEGTSTEPSE | |
| | GSAPGTSTEPSEGSAPGSEPATSGSETPGTSESATPESGPGTSTACSEGSAPSASR | |
| Seg 196 | SAGSPTGPGSEPATSGSETPGTSESATPESGPGSEPATSGSETPGTSESATPESGPGT | 388 |
| | STEPSEGSAPGSPAGSPTSTEEGTSESATPESGPGSEPATSGSETPGTSESATPESGP | |
| | GSPAGSPTSTEEGSPAGSPTSTEEGTSTEPSEGSAPGTSESATPESGPGTSESATPES | |
| | GPGTSESATPESGPGSEPATSGSETPGSEPATSGSETPGSPAGSPTSTEEGTSTEPSE | |
| | GSAPGTSTEPSEGSAPGSEPATSGSETPGTSESATPESGPGTSTEPSEGSCASASR | |
| Seg 197 | SAGSPGSCAGSPTSTEEGTSESACPESGPGTSTEPSEGSCPGSPAGSPTSTEEGTCTE | 389 |
| | PSEGSAPGTSTEPCSGSAPGTSESATPESCPGSEPATSGSETPGSCPATSGSETPGSP | |
| | AGSCTSTEEGTSESATPESCPGTESASR | |
| Seg 198 | SAGSPTGCGSEPATSGSETPGTSESATPESGPGSEPATSGSETPGTSESATPESGPGT | 390 |
| | STEPSEGSAPGSPAGSPTSTEEGTSESATPESGPGSEPATSGSETPGTSESATPESGP | |
| | GSPAGSPTSTEEGSPAGSPTSTEEGTSCTPSEGSAPGTSESATPESGPGTSESATPES | |
| | GPGTSESATPESGPGSEPATSGSETPGSEPATSGSETPGSPAGSPTSTEEGTSTEPSE | |
| | GSAPGTSTEPSEGSAPGSEPATSGSETPGTSESATPESGPGTSTEPSCGSAPSASR | |
| Seg 199 | SAGSPTGCGSEPATSGSETPGTSESATPESGPGSEPATSGSCTPGTSESATPESGPGT | 391 |
| | STEPSEGSAPGSPAGSPCSTEEGTSESATPESGPGSEPATSGSETPGTSESCTPESGP | |
| | GSPAGSPTSTEEGSPAGSPTSTEEGTSCTPSEGSAPGTSESATPESGPGTSESATPES | |
| | GPGCSESATPESGPGSEPATSGSETPGSEPATSGSETCGSPAGSPTSTEEGTSTEPSE | |
| | GSAPGTSTEPSEGCAPGSEPATSGSETPGTSESATPESGPGTSTEPSCGSAPSASR | |

[0241] In another embodiment, the invention provides inserts of lysine as part of a longer sequence defined as a lysine island. Examples of lysine island are shown in Table 4. The benefit of flanking all lysine residues in an XTEN with similar or identical sequence is that it results in a more uniform chemical reactivity for each lysine. Another benefit results from the ability to perform peptide mapping to measure the degree of payload linking. Examples include the islands I_L6, I_L7, and I_L8 of Table 4. These islands comprise glutamate residues that facilitate peptide mapping using GluC protease. In another embodiment, the invention provides inserts of cysteine as part of a longer sequence defined as a cysteine island. Examples of cysteine island are shown in Table 5. The benefit of flanking all cysteine residues in an XTEN with similar or identical sequence is that it results in a more uniform chemical reactivity for each cysteine. Another benefit results from the ability to perform peptide mapping to measure the degree of payload conjugation. Examples include islands I_C4, I_C7, I_C8, and I_C9 of Table 5. These islands comprise glutamate residues that facilitate peptide mapping using GluC protease. The islands can be inserted into constructs encoding the existing XTEN by conventional PCR methods, as described above and in the Examples. Oligonucleotides encoding the islands can be inserted into constructs encoding the existing XTEN by conventional PCR methods. For example, in one embodiment, where an existing full-length XTEN gene is to be modified with nucleotides encoding one or more reactive cysteine or lysine residues, an oligonucleotide can be created that encodes a cysteine or lysine and that exhibits partial homology to and can hybridize with one or more short sequences of the XTEN, resulting in a recombination event and substitution of a cysteine or the lysine codon for an existing codon of the XTEN gene (see, e.g., Examples 6 and 7 for a description of the general methods). In one exemplary embodiment, the recombination results in a replacement with the amino acid sequence GGSPAGSCTSP (SEQ ID NO: 187) of the I_C1 island. However, the oligonucleotides can be designed to place the cysteine (or lysine) in a different location in the motif or to include a second cysteine (or lysine) in the motif. The cysteine- or lysine-encoding oligonucleotides can be designed to hybridize with a given sequence segment at different points along the known XTEN sequence to permit their insertion into an XTEN-encoding gene. Thus, the invention contemplates that multiple XTEN gene constructs can be created with cysteines or lysines inserted at different locations within the XTEN sequence by the selection of restriction sites within the XTEN sequence and the design of oligonucleotides appropriate for the given location and that encode a cysteine or lysine, including use of designed oligonucleotides that result in multiple insertions in the same XTEN sequence. By the design and selection of one or more such oligonucleotides in consideration of the known sequence of the XTEN, and the appropriate use of the methods of the invention, the potential number of substituted reactive cysteine or lysine residues inserted into the full-length XTEN can be estimated and then confirmed by sequencing the resulting XTEN gene.

TABLE 4
Examples of lysine islands

| Designator | Amino Acid Sequence | SEQ ID NO: |
|---|---|---|
| I_L1 | GGSPAGSKPTSP | 392 |
| I_L2 | GASASKPAPSTG | 393 |
| I_L3 | PKP | |
| I_L4 | PPKPP | 394 |
| I_L5 | GGKPG | 395 |
| I_L6 | EGGKPGES | 396 |
| I_L7 | EGGSPAGSKPTSPE | 397 |
| I_L8 | EGASASKPAPSTGE | 398 |

TABLE 5
Examples of cysteine islands

| Designator | Sequence | SEQ ID NO: |
|---|---|---|
| I_C1 | GGSPAGSCTSP | 399 |
| I_C2 | GASASCAPSTG | 400 |
| I_C3 | GPEPTCPAPSG | 401 |
| I_C4 | TAEAAGCGTAEAA | 402 |
| I_C5 | GECEP | 403 |
| I_C6 | GRPCRP | 404 |
| I_C7 | GETSPAGSCTSPTET | 405 |
| I_C8 | TESGRPCRPSET | 406 |
| I_C9 | GPEPTCPAPSEG | 407 |

[0242] XTEN can be designed to comprise both lysine and cysteine residues for conjugation as illustrated in FIG. 1D. This enables one to conjugate two different payloads to the same XTEN polymer using conjugations methods tailored to react with the functional group or linker attached to the cysteine or lysine. Such mixed payloads can have additive and/or synergistic pharmacologic effects when administered to a subject in a single composition. Alternatively, the mixed payloads can be a combination of a targeting moiety and an active payload in order to deliver the pharmacophore to a desired location in the subject. By controlling the number and position of lysine and cysteine residues one can control the number and position of conjugated payloads. This enables one to adjust the relative potency or selectivity of the payloads in the resulting XTEN-payload conjugate.

[0243] The design, selection, and preparation methods of the invention enable the creation of engineered XTEN that are reactive with electrophilic functionality. The methods to make the subject conjugates provided herein enable the creation of XTEN-payload conjugates, XTEN-cross-linker conjugates, and XTEN-azide/alkyne reactant conjugates with the linker or payload molecules added in a quantified fashion at designated sites, as illustrated schematically in FIGS. 1A-1E. Payloads, cross-linkers, and azide/alkyne reactants may be site-specifically and efficiently linked to the N- or C-terminus of XTEN, to cysteine-engineered XTEN with a thiol-reactive reagent, or to lysine-engineered XTEN of the invention with an amine-reactive reagent, and to an alpha amino group at the N-terminus of XTEN, as described more fully, below, and then are purified and characterized as shown schematically in FIG. 40 using, for example, the non-limiting methods described more specifically in the Examples.

### 4. Length of Sequence

[0244] In another aspect, the invention provides XTEN of varying lengths for incorporation into the compositions wherein the length of the XTEN sequence(s) are chosen based on the property or function to be achieved in the composition. Depending on the intended property or function, the XTEN-payload conjugates comprise short or intermediate length XTEN or longer XTEN sequences, or multimers of short, intermediate or longer XTEN that can serve as carriers. While not intended to be limiting, the XTEN or fragments of XTEN include short segments of about 6 to about 99 amino acid residues, intermediate lengths of about 100 to about 399 amino acid residues, and longer lengths of about 400 to about 1000 and up to about 3000 amino acid residues. Thus, the XTEN utilized as conjugation partners for incorporation into the subject conjugates encompass XTEN or fragments of XTEN with lengths of about 6, or about 12, or about 36, or about 40, or about 48, or about 72 or about 96, or about 144, or about 288, or about 400, or about 432, or about 500, or about 576, or about 600, or about 700, or about 800, or about 864, or about 900, or about 1000, or about 1500, or about 2000, or about 2500, or up to about 3000 amino acid residues in length. In other cases, the XTEN sequences can be about 6 to about 50, about 50 to about 100, about 100 to 150, about 150 to 250, about 250 to 400, about 400 to about 500, about 500 to about 900, about 900 to 1500, about 1500 to 2000, or about 2000 to about 3000 amino acid residues in length. The precise length of an XTEN incorporated into the subject XTEN-payload conjugates can vary without adversely affecting the biological activity of the conjugate. In one embodiment, one or more of the XTEN may be selected from one of the XTEN family sequences; e.g., AD, AE, AF, AG, AM, AQ, BC, or BD. In some embodiments, the XTEN utilized to create the subject conjugates comprise XTEN selected from any one of the sequences in Table 2, Table 3, and Tables 22-25, which may be linked to the payload component directly or via cross-linkers disclosed herein. In other embodiments, the one or more XTEN utilized to create the subject conjugates individually comprise an XTEN sequence having at least about 80% sequence identity, or alternatively 81%, 82%, 83%, 84%, 85%, 86%, 87%, 88%, 89%, 90%, 91%, 92%, 93%, 94%, 95%, 96%, 97%, 98%, 99%, or 100% sequence identity compared to an XTEN selected from Tables 2, 3, 22-25 or a fragment thereof, when optimally aligned with a sequence of comparable length. In some embodiments, the subject conjugates comprise 2, 3, 4, or more XTEN sequence, wherein the cumulative length of the residues in the XTEN sequences is greater than about 100 to about 3000, or about 400 to about 2000, or about 800 to 1000 amino acid residues and the XTEN can be identical or they can be different in sequence or in length. As used herein, cumulative length is intended to encompass the total length, in amino acid residues, when more than one XTEN is incorporated into the conjugate.

[0245] As described more fully below, methods are disclosed in which the XTEN-payload conjugates are designed by selecting the length of the XTEN and a method of linking with a cross-linker reactant or the payload to confer a physicochemical property (e.g., stability or solubility) or to result in a target half-life or retention of activity when an XTEN-payload conjugate is administered to a subject.

[0246] XTEN are used as a carrier in the compositions, the invention taking advantage of the discovery that increasing the length of the non-repetitive, unstructured polypeptides enhances the unstructured nature of the XTENs and correspondingly enhances the physicochemical and pharmacokinetic properties of constructs comprising the XTEN carrier. In general, XTEN as monomers or as multimers with cumulative lengths longer that about 400 residues incorporated into the conjugates result in longer half-life compared to shorter cumulative lengths, e.g., shorter than about 280 residues. As described more fully in the Examples, proportional increases in the length of the XTEN, even if created by a repeated order of single family sequence motifs (e.g., the four AE motifs of Table 1), result in a sequence with a higher percentage of random coil formation, as determined by GOR algorithm, or reduced content of alpha-helices or beta-sheets, as determined by Chou-Fasman algorithm, compared to shorter XTEN lengths. In addition, increasing the length of the unstructured polypeptide fusion partner, as described in the Examples, results in a construct with a disproportionate increase in terminal half-life compared to polypeptides with unstructured polypeptide partners with shorter sequence lengths. In some embodiments, where the XTEN serve primarily as a carrier, the invention encompasses XTEN conjugate compositions comprising two, three, four or more XTEN wherein the cumulative XTEN sequence length of the XTEN proteins is greater than about 100, 200, 400, 500, 600, 800, 900, or 1000 to about 3000 amino acid residues, wherein the construct exhibits enhanced pharmacokinetic properties when administered to a subject compared to a payload not linked to the XTEN and administered at a comparable dose. In one embodiment of the foregoing, the two or more XTEN sequences each exhibit at least about 80%, 90%, 91%, 92%, 93%, 94%, 95%, 96%, 97%, or 98% or more identity to a sequence selected from any one of Table 2, Table 3, or Tables 22-25, and the remainder, if any, of the carrier sequence(s) contains at least 90% hydrophilic amino acids and less than about 2% of the overall sequence consists of hydrophobic or aromatic amino acids or cysteine. The enhanced pharmacokinetic properties of the XTEN-payload conjugate, in comparison to payload not linked to XTEN, are described more fully, below.

5. XTEN Segments from XTEN Precursors

[0247] In another aspect, the invention provides methods to create XTEN of short or intermediate lengths from longer “donor” XTEN sequences, wherein the longer donor XTEN sequence is truncated at the N-terminus, or the C-terminus, or segments are created by protealysis of XTEN comprising cleavage sequences, thereby resulting in a short or intermediate length XTEN. In non-limiting examples, an AG864 sequence of 864 amino acid residues can be truncated to yield an AG144 with 144 residues, an AG288 with 288 residues, an AG576 with 576 residues, or other intermediate lengths, while the AE864 sequence can be truncated to yield multiple AE144 sequences, an AE288 sequence or an AE576 sequence with 288 or 576 residues or other shorter or intermediate lengths. Similarly, the DNA encoding the longer “donor” sequences can be manipulated to incorporate cysteine or lysine residues intended for use in conjugates with short or intermediate length XTEN. It is specifically contemplated that such an approach can be utilized with any of the XTEN embodiments described herein or with any of the sequences listed in Tables 2, 3, 21 and 22 to result in XTEN of a desired length.

[0248] In another aspect, the invention provides XTEN with cleavage sequences incorporated internal to the sequence at defined intervals such that the XTEN can be processed by cleavage into 2, 3, 4, 5, or 6 shorter XTEN of uniform lengths. As illustrated in FIG. % A, a monomeric XTEN is designed with two internal cleavage sequences that, when treated with a protease under conditions effective to result in the cleavage of all cleavage sequences, results in three XTEN segments of uniform length. In addition, the XTEN are designed with a sequence such that the resulting XTEN segments also have the identical amino acid sequence, inclusive of the residual cleavage sequence. In one embodiment, the invention provides an XTEN with a defined, sequence comprising 1, 2, 3, 4, or 5 arginine (R) residues internal to the XTEN sequence and spaced at uniform intervals along the XTEN sequence bridging identical XTEN segments wherein treatment with trypsin results in cleavage of the XTEN into XTEN segments to having an identical length and sequence. In the foregoing embodiment, the arginine residue does not have a proline residue at the adjacent P1′ position. Thus, by treatment of the foregoing with trypsin, an XTEN with 1 internal arginine would result in 2 identical XTEN segments, an XTEN with 2 internal argninines would result in 3 identical XTEN segments, etc. In another embodiment, each arginine of the foregoing embodiments is replaced with lysine residues. In another embodiment, the invention provides an XTEN with a defined sequence comprising 1, 2, 3, 4, or 5 cleavage sequences internal to the XTEN sequence and spaced at uniform intervals along the XTEN sequence, wherein each cleavage sequence is SASRSA, and wherein treatment with trypsin results in cleavage of the XTEN into XTEN segments to having an identical length and sequence. In another embodiment, the invention provides an XTEN with at least about 90%, or at least about 91%, or at least about 92%, or at least about 93%, or at least about 94%, or at least about 95%, or at least about 96%, or at least about 97%, or at least about 98%, or at least about 99% sequence identity to a sequence selected from the group of sequences set forth in Table 6. In another embodiment, the invention provides an XTEN with at least about 90%, or at least about 91%, or at least about 92%, or at least about 93%, or at least about 94%, or at least about 95%, or at least about 96%, or at least about 97%, or at least about 98%, or at least about 99% sequence identity to a sequence selected from the group of sequences set forth in Table 6, wherein the XTEN further comprises a first and a second affinity tag wherein each affinity tags are linked to the XTEN by a cleavage sequence at the N- and C-termini of the XTEN, respectively, wherein each cleavage sequence is capable of being cleaved by trypsin, and wherein the first affinity tag is different from the second affinity tag and each is independently selected from the group consisting of the affinity tags set forth in Table 7. The foregoing embodiment is illustrated in FIG. 96B, wherein the treatment with protease of the XTEN with two internal cleavage sequences and an N-terminal and a C-terminal affinity tag each linked to the XTEN by cleavage sequence results in cleavage of the construct into three XTEN segments of uniform length and liberation of the two affinity tags, the resulting preparation of which can be subsequently processed into substantially homogeneous XTEN as described herein, below. Variations of XTEN comprising such uniform cleavage sequences and their distribution in the sequence are contemplated by the invention.

TABLE 6
Precursor XTEN with Internal Cleavage Sequences

| | | SEQ |
|---|---|---|
| XTEN | | ID |
| Name | Amino Acid Sequence | NO: |
| AE864_R2 | SAGSPGSPAGSPTSTEEGTSESATPESGPGTSTEPSEGSAPGSPAGSPTSTEEGTST | 408 |
| (2x AE432_R1) | EPSEGSAPGTSTEPSEGSAPGTSESATPESGPGSEPATSGSETPGSEPATSGSETPG | |
| | SPAGSPTSTEEGTSESATPESGPGTSTEPSEGSAPGTSTEPSEGSAPGSPAGSPTST | |
| | EEGTSTEPSEGSAPGTSTEPSEGSAPGTSESATPESGPGTSTEPSEGSAPGTSESAT | |
| | PESGPGSEPATSGSETPGTSTEPSEGSAPGTSTEPSEGSAPGTSESATPESGPGTSE | |
| | SATPESGPGSPAGSPTSTEEGTSESATPESGPGSEPATSGSETPGTSESATPESGPG | |
| | TSTEPSEGSAPGTSTEPSEGSAPGTSTEPSEGSAPGTSTEPSEGSAPGTSTEPSEGS | |
| | APGTSTEPSEGSAPGSPAGSPTSTEEGTESASRSAGSPGSPAGSPTSTEEGTSESAT | |
| | PESGPGTSTEPSEGSAPGSPAGSPTSTEEGTSTEPSEGSAPGTSTEPSEGSAPGTSE | |
| | SATPESGPGSEPATSGSETPGSEPATSGSETPGSPAGSPTSTEEGTSESATPESGPG | |
| | TSTEPSEGSAPGTSTEPSEGSAPGSPAGSPTSTEEGTSTEPSEGSAPGTSTEPSEGS | |
| | APGTSESATPESGPGTSTEPSEGSAPGTSESATPESGPGSEPATSGSETPGTSTEPS | |
| | EGSAPGTSTEPSEGSAPGTSESATPESGPGTSESATPESGPGSPAGSPTSTEEGTSE | |
| | SATPESGPGSEPATSGSETPGTSESATPESGPGTSTEPSEGSAPGTSTEPSEGSAPG | |
| | TSTEPSEGSAPGTSTEPSEGSAPGTSTEPSEGSAPGTSTEPSEGSAPGSPAGSPTST | |
| | EEGTESASR | |
| AE864_R3 | SAGSPTGPGSEPATSGSETPGTSESATPESGPGSEPATSGSETPGTSESATPESGPG | 409 |
| (3x AE288_R1) | TSTEPSEGSAPGSPAGSPTSTEEGTSESATPESGPGSEPATSGSETPGTSESATPES | |
| | GPGSPAGSPTSTEEGSPAGSPTSTEEGTSTEPSEGSAPGTSESATPESGPGTSESAT | |
| | PESGPGTSESATPESGPGSEPATSGSETPGSEPATSGSETPGSPAGSPTSTEEGTST | |
| | EPSEGSAPGTSTEPSEGSAPGSEPATSGSETPGTSESATPESGPGTSTEPSEGSAPS | |
| | ASRSAGSPTGPGSEPATSGSETPGTSESATPESGPGSEPATSGSETPGTSESATPES | |
| | GPGTSTEPSEGSAPGSPAGSPTSTEEGTSESATPESGPGSEPATSGSETPGTSESAT | |
| | PESGPGSPAGSPTSTEEGSPAGSPTSTEEGTSTEPSEGSAPGTSESATPESGPGTSE | |
| | SATPESGPGTSESATPESGPGSEPATSGSETPGSEPATSGSETPGSPAGSPTSTEEG | |
| | TSTEPSEGSAPGTSTEPSEGSAPGSEPATSGSETPGTSESATPESGPGTSTEPSEGS | |
| | APSASRSAGSPTGPGSEPATSGSETPGTSESATPESGPGSEPATSGSETPGTSESAT | |
| | PESGPGTSTEPSEGSAPGSPAGSPTSTEEGTSESATPESGPGSEPATSGSETPGTSE | |
| | SATPESGPGSPAGSPTSTEEGSPAGSPTSTEEGTSTEPSEGSAPGTSESATPESGPG | |
| | TSESATPESGPGTSESATPESGPGSEPATSGSETPGSEPATSGSETPGSPAGSPTST | |
| | EEGTSTEPSEGSAPGTSTEPSEGSAPGSEPATSGSETPGTSESATPESGPGTSTEPS | |
| | EGSAPSASR | |
| AE864_R6 | SAGSPGSPAGSPTSTEEGTSESATPESGPGTSTEPSEGSAPGSPAGSPTSTEEGTST | 410 |
| (6x AE144_R1) | EPSEGSAPGTSTEPSEGSAPGTSESATPESGPGSEPATSGSETPGSEPATSGSETPG | |
| | SPAGSPTSTEEGTSESATPESGPGTESASRSAGSPGSPAGSPTSTEEGTSESATPES | |
| | GPGTSTEPSEGSAPGSPAGSPTSTEEGTSTEPSEGSAPGTSTEPSEGSAPGTSESAT | |
| | PESGPGSEPATSGSETPGSEPATSGSETPGSPAGSPTSTEEGTSESATPESGPGTES | |
| | ASRSAGSPGSPAGSPTSTEEGTSESATPESGPGTSTEPSEGSAPGSPAGSPTSTEEG | |
| | TSTEPSEGSAPGTSTEPSEGSAPGTSESATPESGPGSEPATSGSETPGSEPATSGSE | |
| | TPGSPAGSPTSTEEGTSESATPESGPGTESASRSAGSPGSPAGSPTSTEEGTSESAT | |
| | PESGPGTSTEPSEGSAPGSPAGSPTSTEEGTSTEPSEGSAPGTSTEPSEGSAPGTSE | |
| | SATPESGPGSEPATSGSETPGSEPATSGSETPGSPAGSPTSTEEGTSESATPESGPG | |
| | TESASRSAGSPGSPAGSPTSTEEGTSESATPESGPGTSTEPSEGSAPGSPAGSPTST | |
| | EEGTSTEPSEGSAPGTSTEPSEGSAPGTSESATPESGPGSEPATSGSETPGSEPATS | |
| | GSETPGSPAGSPTSTEEGTSESATPESGPGTESASRSAGSPGSPAGSPTSTEEGTSE | |
| | SATPESGPGTSTEPSEGSAPGSPAGSPTSTEEGTSTEPSEGSAPGTSTEPSEGSAPG | |
| | TSESATPESGPGSEPATSGSETPGSEPATSGSETPGSPAGSPTSTEEGTSESATPES | |
| | GPGTESASR | |
| Seg 200 | SAGSPTGPGSEPATSGSETPGTSESATPESGPGSEPATSGSETPGTSESATPESGPG | 411 |
| (3x Seg 195) | TSTEPSEGSAPGSPAGSPTSTEEGTSESATPESGPGSEPATSGSETPGTSESATPES | |
| | GPGSPAGSPTSTEEGSPAGSPTSTEEGTSTEPSEGSAPGTSESATPESGPGTSESAT | |
| | PESGPGTSESATPESGPGSEPATSGSETPGSEPATSGSETPGSPAGSPTSTEEGTST | |
| | EPSEGSAPGTSTEPSEGSAPGSEPATSGSETPGTSESATPESGPGTSTACSEGSAPS | |
| | ASRSAGSPTGPGSEPATSGSETPGTSESATPESGPGSEPATSGSETPGTSESATPES | |
| | GPGTSTEPSEGSAPGSPAGSPTSTEEGTSESATPESGPGSEPATSGSETPGTSESAT | |
| | PESGPGSPAGSPTSTEEGSPAGSPTSTEEGTSTEPSEGSAPGTSESATPESGPGTSE | |
| | SATPESGPGTSESATPESGPGSEPATSGSETPGSEPATSGSETPGSPAGSPTSTEEG | |
| | TSTEPSEGSAPGTSTEPSEGSAPGSEPATSGSETPGTSESATPESGPGTSTACSEGS | |
| | APSASRSAGSPTGPGSEPATSGSETPGTSESATPESGPGSEPATSGSETPGTSESAT | |
| | PESGPGTSTEPSEGSAPGSPAGSPTSTEEGTSESATPESGPGSEPATSGSETPGTSE | |
| | SATPESGPGSPAGSPTSTEEGSPAGSPTSTEEGTSTEPSEGSAPGTSESATPESGPG | |
| | TSESATPESGPGTSESATPESGPGSEPATSGSETPGSEPATSGSETPGSPAGSPTST | |
| | EEGTSTEPSEGSAPGTSTEPSEGSAPGSEPATSGSETPGTSESATPESGPGTSTACS | |
| | EGSAPSASR | |
| Seg 201 | SAGSPTGPGSEPATSGSETPGTSESATPESGPGSEPATSGSETPGTSESATPESGPG | 412 |
| (3x Seg 196) | TSTEPSEGSAPGSPAGSPTSTEEGTSESATPESGPGSEPATSGSETPGTSESATPES | |
| | GPGSPAGSPTSTEEGSPAGSPTSTEEGTSTEPSEGSAPGTSESATPESGPGTSESAT | |
| | PESGPGTSESATPESGPGSEPATSGSETPGSEPATSGSETPGSPAGSPTSTEEGTST | |
| | EPSEGSAPGTSTEPSEGSAPGSEPATSGSETPGTSESATPESGPGTSTEPSEGSCAS | |
| | ASRSAGSPTGPGSEPATSGSETPGTSESATPESGPGSEPATSGSETPGTSESATPES | |
| | GPGTSTEPSEGSAPGSPAGSPTSTEEGTSESATPESGPGSEPATSGSETPGTSESAT | |
| | PESGPGSPAGSPTSTEEGSPAGSPTSTEEGTSTEPSEGSAPGTSESATPESGPGTSE | |
| | SATPESGPGTSESATPESGPGSEPATSGSETPGSEPATSGSETPGSPAGSPTSTEEG | |
| | TSTEPSEGSAPGTSTEPSEGSAPGSEPATSGSETPGTSESATPESGPGTSTEPSEGS | |
| | CASASRSAGSPTGPGSEPATSGSETPGTSESATPESGPGSEPATSGSETPGTSESAT | |
| | PESGPGTSTEPSEGSAPGSPAGSPTSTEEGTSESATPESGPGSEPATSGSETPGTSE | |
| | SATPESGPGSPAGSPTSTEEGSPAGSPTSTEEGTSTEPSEGSAPGTSESATPESGPG | |
| | TSESATPESGPGTSESATPESGPGSEPATSGSETPGSEPATSGSETPGSPAGSPTST | |
| | EEGTSTEPSEGSAPGTSTEPSEGSAPGSEPATSGSETPGTSESATPESGPGTSTEPS | |
| | EGSCASASR | |

### 6. Net Charge

[0249] In other embodiments, the XTEN polypeptides have an unstructured characteristic imparted by incorporation of amino acid residues with a net charge and containing a low percentage or no hydrophobic amino acids in the XTEN sequence. The overall net charge and net charge density is controlled by modifying the content of charged amino acids in the XTEN sequences, either positive or negative, with the net charge typically represented as the percentage of amino acids in the polypeptide contributing to a charged state beyond those residues that are cancelled by a residue with an opposing charge. In some embodiments, the net charge density of the XTEN of the conjugates may be above +0.1 or below −0.1 charges/residue. By “net charge density” of a protein or peptide herein is meant the net charge divided by the total number of amino acids in the protein. In other embodiments, the net charge of an XTEN can be about 0%, about 1%, about 2%, about 3%, about 4%, about 5%, about 6%, about 7%, about 8%, about 9%, about 10% about 11%, about 12%, about 13%, about 14%, about 15%, about 16%, about 17%, about 18%, about 19%, or about 20% or more. Based on the net charge, some XTENs have an isoelectric point (pI) of 1.0, 1.5, 2.0, 2.5, 3.0, 3.5, 4.0, 4.5, 5.0, 5.5, 6.0, or even 6.5. In one embodiment, the XTEN will have an isoelectric point between 1.5 and 4.5 and carry a net negative charge under physiologic conditions.

[0250] Since most tissues and surfaces in a human or animal have a net negative charge, in some embodiments the XTEN sequences are designed to have a net negative charge to minimize non-specific interactions between the XTEN containing compositions and various surfaces such as blood vessels, healthy tissues, or various receptors. Not to be bound by a particular theory, an XTEN can adopt open conformations due to electrostatic repulsion between individual amino acids of the XTEN polypeptide that individually carry a net negative charge and that are distributed across the sequence of the XTEN polypeptide. In some embodiments, the XTEN sequence is designed with at least 90% to 95% of the charged residues separated by other non-charged residues such as serine, alanine, threonine, proline or glycine, which leads to a more uniform distribution of charge, better expression or purification behavior. Such a uniform distribution of net negative charge in the extended sequence lengths of XTEN also contributes to the unstructured conformation of the polymer that, in turn, can result in an effective increase in hydrodynamic radius. In preferred embodiments, the negative charge of the subject XTEN is conferred by incorporation of glutamic acid residues. Generally, the glutamic residues are spaced uniformly across the XTEN sequence. In some cases, the XTEN can contain about 10-80, or about 15-60, or about 20-50 glutamic residues per 20 kDa of XTEN that can result in an XTEN with charged residues that would have very similar pKa, which can increase the charge homogeneity of the product and sharpen its isoelectric point, enhance the physicochemical properties of the resulting XTEN-payload for, and hence, simplifying purification procedures. For example, where an XTEN with a negative charge is desired, the XTEN can be selected solely from an AE family sequence, which has approximately a 17% net charge due to incorporated glutamic acid, or can include varying proportions of glutamic acid-containing motifs of Table 1 to provide the desired degree of net charge. Non-limiting examples of AE XTEN include, but are not limited to the AE36, AE42, AE144, AE288, AE432, AE576, AE624, AE864, and AE912 sequences of Tables 2 and 21 or fragments thereof. In one embodiment, an XTEN sequence of Tables 2 or 3 can be modified to include additional glutamic acid residues to achieve the desired net negative charge. Accordingly, in one embodiment the invention provides XTEN in which the XTEN sequences contain about 1%, 2%, 4%, 8%, 10%, 15%, 17%, 20%, 25%, or even about 30% glutamic acid. In some cases, the XTEN can contain about 10-80, or about 15-60, or about 20-50 glutamic residues per 20 kDa of XTEN that can result in an XTEN with charged residues that would have very similar pKa, which can increase the charge homogeneity of the product and sharpen its isoelectric point, enhance the physicochemical properties of the resulting XTEN conjugate composition, and hence, simplifying purification procedures. In one embodiment, the invention contemplates incorporation of up to 5% aspartic acid residues into XTEN in addition to glutamic acid in order to achieve a net negative charge.

[0251] Not to be bound by a particular theory, the XTEN of the XTEN-payload conjugates with the higher net negative charge are expected to have less non-specific interactions with various negatively-charged surfaces such as blood vessels, tissues, or various receptors, which would further contribute to reduced active clearance. Conversely, it is believed that the XTEN of the XTEN-payload conjugates with a low (or no) net charge would have a higher degree of interaction with surfaces that can potentiate the activity of the associated conjugate in the vasculature or tissues.

[0252] In other embodiments, where no net charge is desired, the XTEN can be selected from, for example, AG XTEN components, such as the AG motifs of Table 1, or those AM motifs of Table 1 that have no net charge. Non-limiting examples of AG XTEN include, but are not limited to 36, 42, 144, 288, 576, and 864 AG family sequences of Tables 2 and 22, or fragments thereof. In another embodiment, the XTEN can comprise varying proportions of AE and AG motifs in order to have a net charge that is deemed optimal for a given use or to maintain a given physicochemical property.

[0253] The XTEN of the conjugates of the present invention generally have no or a low content of positively charged amino acids. In some embodiments, the XTEN may have less than about 10% amino acid residues with a positive charge, or less than about 7%, or less than about 5%, or less than about 2%, or less than about 1% amino acid residues with a positive charge. However, the invention contemplates constructs where a defined number of amino acids with a positive charge, such as lysine, are incorporated into XTEN to permit conjugation between the epsilon amine of the lysine and a reactive group on a payload or a cross-linker to be conjugated to the XTEN backbone. In one embodiment of the foregoing, the XTEN of the subject conjugates has between about 1 to about 100 lysine residues, or about 1 to about 70 lysine residues, or about 1 to about 50 lysine residues, or about 1 to about 30 lysine residues, or about 1 to about 20 lysine residues, or about 1 to about 10 lysine residues, or about 1 to about 5 lysine residues, or about 1 to about 3 lysine residues, or alternatively only a single lysine residue. Using the foregoing lysine-containing XTEN, conjugates can be constructed that comprise XTEN, an optional linker, plus a payload useful in the treatment of a condition in a subject wherein the maximum number of molecules of the payload agent linked to the XTEN component is determined by the numbers of lysines with a reactive side group (e.g., a terminal amine) incorporated into the XTEN.

### 7. Low Immunogenicity

[0254] In another aspect, the invention provides XTEN compositions having a low degree of immunogenicity or are substantially non-immunogenic. Several factors can contribute to the low immunogenicity of XTEN, e.g., the non-repetitive sequence, the unstructured conformation, the high degree of solubility, the low degree or lack of self-aggregation, the low degree or lack of proteolytic sites within the sequence, and the low degree or lack of epitopes in the XTEN sequence.

[0255] Conformational epitopes are formed by regions of the protein surface that are composed of multiple discontinuous amino acid sequences of the protein antigen. The precise folding of the protein brings these sequences into a well-defined, stable spatial configurations, or epitopes, that can be recognized as “foreign” by the host humoral immune system, resulting in the production of antibodies to the protein or the activation of a cell-mediated immune response. In the latter case, the immune response to a protein in an individual is heavily influenced by T-cell epitope recognition that is a function of the peptide binding specificity of that individual's HLA-DR allotype. Engagement of a MHC Class II peptide complex by a cognate T-cell receptor on the surface of the T-cell, together with the cross-binding of certain other co-receptors such as the CD4 molecule, can induce an activated state within the T-cell. Activation leads to the release of cytokines further activating other lymphocytes such as B cells to produce antibodies or activating T killer cells as a full cellular immune response.

[0256] The ability of a peptide to bind a given MHC Class II molecule for presentation on the surface of an APC (antigen presenting cell) is dependent on a number of factors; most notably its primary sequence. In one embodiment, a lower degree of immunogenicity is achieved by designing XTEN sequences that resist antigen processing in antigen presenting cells, and/or choosing sequences that do not bind MHC receptors well. The invention provides XTEN-payload, XTEN-cross-linker, and XTEN-click-chemistry reactant conjugates with substantially non-repetitive XTEN polypeptides designed to reduce binding with MHC II receptors, as well as avoiding formation of epitopes for T-cell receptor or antibody binding, resulting in a low degree of immunogenicity. Avoidance of immunogenicity can attribute to, at least in part, a result of the conformational flexibility of XTEN sequences; i.e., the lack of secondary structure due to the selection and order of amino acid residues. For example, of particular interest are sequences having a low tendency to adapt compactly folded conformations in aqueous solution or under physiologic conditions that could result in conformational epitopes. The administration of polypeptides comprising XTEN, using conventional therapeutic practices and dosing, would generally not result in the formation of neutralizing antibodies to the XTEN sequence, and also reduce the immunogenicity of the payload in the conjugates.

[0257] In one embodiment, the XTEN sequences utilized in the subject polypeptides can be substantially free of epitopes recognized by human T cells. The elimination of such epitopes for the purpose of generating less immunogenic proteins has been disclosed previously; see for example WO 98/52976, WO 02/079232, and WO 00/3317 which are incorporated by reference herein. Assays for human T cell epitopes have been described (Stickler, M., et al. (2003) J Immunol Methods, 281: 95-108). Of particular interest are peptide sequences that can be oligomerized without generating T cell epitopes or non-human sequences. This is achieved by testing direct repeats of these sequences for the presence of T-cell epitopes and for the occurrence of 6 to 15-mer and, in particular, 9-mer sequences that are not human, and then altering the design of the XTEN sequence to eliminate or disrupt the epitope sequence. In some embodiments, the XTEN sequences are substantially non-immunogenic by the restriction of the numbers of epitopes of the XTEN predicted to bind MHC receptors. With a reduction in the numbers of epitopes capable of binding to MHC receptors, there is a concomitant reduction in the potential for T cell activation as well as T cell helper function, reduced B cell activation or upregulation and reduced antibody production. The low degree of predicted T-cell epitopes can be determined by epitope prediction algorithms such as, e.g., TEPITOPE (Sturniolo, T., et al. (1999) Nat Biotechnol, 17: 555-61), as shown in Example 46. The TEPITOPE score of a given peptide frame within a protein is the log of the K_{d} (dissociation constant, affinity, off-rate) of the binding of that peptide frame to multiple of the most common human MHC alleles, as disclosed in Sturniolo, T. et al. (1999) Nature Biotechnology 17:555). The score ranges over at least 20 logs, from about 10 to about −10 (corresponding to binding constraints of 10e¹⁰ K_{d} to 10e⁻¹⁰ K_{d}), and can be reduced by avoiding hydrophobic amino acids that serve as anchor residues during peptide display on MHC, such as M, I, L, V, F. In some embodiments, an XTEN component incorporated into either a XTEN-payload, XTEN-cross-linker, or XTEN-click-chemistry reactant conjugate does not have a predicted T-cell epitope at a TEPITOPE threshold score of about −5, or −6, or −7, or −8, or −9, or at a TEPITOPE score of −10. As used herein, a score of “−9” is a more stringent TEPITOPE threshold than a score of −5.

### 8. Increased Hydrodynamic Radius

[0258] In another aspect, a subject XTEN useful as a fusion partner has a high hydrodynamic radius; a property that confers a corresponding increased apparent molecular weight to the XTEN-payload composition compared to the payload without the XTEN. As detailed in Example 26, the linking of XTEN to therapeutic protein sequences results in compositions that can have increased hydrodynamic radii, increased apparent molecular weight, and increased apparent molecular weight factor compared to a therapeutic protein not linked to an XTEN. For example, in therapeutic applications in which prolonged half-life is desired, compositions in which one or more XTEN with a high hydrodynamic radius are conjugated to a payload can effectively enlarge the hydrodynamic radius of the conjugate beyond the glomerular pore size of approximately 3-5 nm (corresponding to an apparent molecular weight of about 70 kDa) (Caliceti. 2003. Pharmacokinetic and biodistribution properties of poly(ethylene glycol)-protein conjugates. Adv Drug Deliv Rev 55:1261-1277), resulting in reduced renal clearance of circulating proteins with a corresponding increase in terminal half-life and other enhanced pharmacokinetic properties. The hydrodynamic radius of a protein is conferred by its molecular weight as well as by its structure, including shape or compactness. Not to be bound by a particular theory, the XTEN can adopt open conformations due to the electrostatic repulsion between individual charges of incorporated charged residues in the XTEN as wells as because of the inherent flexibility imparted by the particular amino acids in the sequence that lack potential to confer secondary structure. The open, extended and unstructured conformation of the XTEN polypeptide has a greater proportional hydrodynamic radius compared to polypeptides of a comparable sequence length and/or molecular weight that have secondary or tertiary structure, such as typical globular proteins. Methods for determining the hydrodynamic radius are well known in the art, such as by the use of size exclusion chromatography (SEC), as described in U.S. Pat. Nos. 6,406,632 and 7,294,513. Example 26 demonstrates that increases in XTEN length result in proportional increase in the hydrodynamic radius, apparent molecular weight, and/or apparent molecular weight factor, and thus permit the tailoring of an XTEN-payload to desired cut-off values of apparent molecular weights or hydrodynamic radii. Accordingly, in certain embodiments, the XTEN-payload can be configured with an XTEN such that the resulting conjugate can have a hydrodynamic radius of at least about 5 nm, or at least about 8 nm, or at least about 10 nm, or about 12 nm, or about 15 nm, or about 20 nm, or about 30 nm or more. In the foregoing embodiments, the large hydrodynamic radius conferred by the XTEN in a XTEN-payload conjugate can lead to reduced clearance of the resulting conjugate, an increase in terminal half-life, and an increase in mean residence time. As described in the Examples, when the molecular weights of the XTEN-containing compositions are derived from size exclusion chromatography analyses, the open conformation of the XTEN due to the low degree of secondary structure results in an increase in the apparent molecular weight of the conjugates into which they are incorporated. In one embodiment, the present invention makes use of the discovery that the increase in apparent molecular weight can be accomplished by the linking not only of a single XTEN of a given length, but also by the linking of 2, 3, 4 or more XTEN of proportionally shorter lengths, either in linear fashion or as a trimeric or tetrameric, branched configuration, as described more fully, below. In some embodiments, the XTEN comprising a payload and one or more XTEN exhibits an apparent molecular weight of at least about 400 kD, or at least about 500 kD, or at least about 700 kD, or at least about 1000 kD, or at least about 1400 kD, or at least about 1600 kD, or at least about 1800 kD, or at least about 2000 kD. Accordingly, the XTEN-payload conjugate exhibits an apparent molecular weight that is about 1.3-fold greater, or about 2-fold greater, or about 3-fold greater or about 4-fold greater, or about 8-fold greater, or about 10-fold greater, or about 12-fold greater, or about 15-fold, or about 20-fold greater than the actual molecular weight of the conjugate. In one embodiment, the isolated XTEN-payload conjugate of any of the embodiments disclosed herein exhibit an apparent molecular weight factor under physiologic conditions that is greater than about 1.3, or about 2, or about 3, or about 4, or about 5, or about 6, or about 7, or about 8, or about 10, or greater than about 15. In another embodiment, the XTEN-payload has, under physiologic conditions, an apparent molecular weight factor that is about 3 to about 20, or is about 5 to about 15, or is about 8 to about 12, or is about 9 to about 10 relative to the actual molecular weight of the conjugate. Generally, the increased apparent molecular weight of the subject XTEN-payload conjugates enhances the pharmacokinetic properties of the composition by a combination of factors, which include reduced active clearance, reduced renal clearance, and reduced loss through capillary and venous junctions.

### 9. Compositions and Methods of Purifying XTEN as Substantially Homogeneous Preparations

[0259] It is an object of the invention to provide compositions of XTEN and methods of making preparations comprising XTEN with a high level of purity and uniformity in the length and composition of the XTEN described herein.

[0260] The expression of recombinant XTEN protein or a recombinant fusion protein comprising XTEN in a host cell normally, like any globular protein, results in a mixture of different compounds in which a portion are truncated versions of the desired protein length. The truncation can be the result of early termination of translation, mRNA instability, or proteolysis in the host cell. Because globular proteins generally have efficient or complete folding into their three-dimensional structure while truncated versions do not, typical purification and recovery processes can successfully separate and remove the truncated versions such that a high level of product homogeneity is achieved in a given preparation of globular proteins. However, protein polymers such as XTEN are unique in that, given their unstructured nature, generally lack three-dimensional structures. It has been difficult to obtain a homogeneous preparation of full-length XTENs due to one or more of the above-mentioned reasons. This is because incomplete or truncated XTEN chains differ only slightly in their physicochemical properties from the desired full-length sequences such that traditional processes that would be sufficient for purification of globular proteins are not effective in the removal of truncated XTEN from the expression product in order to obtain a substantially homogeneous preparation of full-length sequences. While the subject XTEN of the invention, including XTEN linked to payload, can be purified to a moderate degree of homogeneity by conventional means used for proteins, such as salt fractionation, ion exchange chromatography, size exclusion chromatography, hydroxyapatite adsorption chromatography, hydrophobic interaction chromatography or gel electrophoresis, these methods alone do not result in preparations wherein the XTEN are substantially homogeneous in sequence length.

[0261] The subject methods provided herein permit production of substantially homogenous preparation of XTENs via one or a few simple purification steps. In one embodiment, the practice of any of such methods of the present invention can utilize an XTEN designed to further comprise, as a fusion protein, affinity tags located at either or both of the N- and C-termini of the XTEN such that the expressed product can be subject to purification methods to selectively capture the full-length expressed polypeptide, thereby removing truncated XTEN by-products (see FIGS. 41-42). Non-limiting examples of affinity tags that can be added to the termini of XTEN are presented in Table 7. Non-limiting examples of methods of the design, expression, and purification methods to achieve substantially homogeneous XTEN are described in the Examples.

[0262] In some embodiments, the invention provides substantially homogeneous polypeptide compositions with XTEN fused directly to one affinity tag (such as, but not limited to the tags of Table 7) linked to either the N- or C-terminus of the XTEN. In other embodiments, the invention provides substantially homogeneous polypeptide compositions with XTEN fused to one affinity tag (such as, but not limited to the tags of Table 7) by a cleavage sequence linked to either the N- or C-terminus of the XTEN. In other embodiments, the invention provides substantially homogeneous polypeptide compositions with XTEN fused directly to one or two different affinity tags (such as, but not limited to the tags of Table 7) linked to the N- and/or C-termini of the XTEN, as shown in FIG. 41. In other embodiments, the invention provides substantially homogeneous compositions with XTEN fused to one or two cleavage sequences (such as, but not limited to the cleavage sequences of Table 8 or Table 9) which, in turn, are each fused to different affinity tags (such as, but not limited to the tags of Table 7) linked to the N- or C-termini or both the N- and C-termini of the XTEN, as shown in FIG. 41. In yet other embodiments, the invention provides substantially homogeneous polypeptide compositions with XTEN fused directly to one or two different affinity tags (such as, but not limited to the tags of Table 7) linked to the N- and/or C-termini of the XTEN that further comprise a helper sequence (such as, but not limited to the sequences of Table 12) fused to the N-terminus of the protein. As used in the context of the proteins described herein, “substantially homogeneous” means that at least about 85%, or at least about 90%, or at least about 91%, or at least about 92%, or at least about 93%, or at least about 94%, or at least about 95%, 96%, 97%, 98%, 99% or even higher of the polypeptide sequences of the preparation have identical sequence length. The percent values are based on the area percentage of the chromatogram of the preparation analyzed by HPLC or the area percentage of the scan of the preparation analyzed by SDS-PAGE, or by other such standard procedures known in the art for assessing the purity of proteins.

[0263] In one embodiment, the invention provides a substantially homogenous polypeptide having the configuration of formula I:

(HS)-(AT1)-(CS1)-(XTEN) I

wherein HS is the helper sequence, AT1 is the first affinity tag, CS1 is the first cleavage sequence, and XTEN is the extended recombinant polypeptide.

[0264] In another embodiment, the invention provides a substantially homogenous polypeptide having the configuration of formula II

(HS)-(CS1)-(XTEN)-(CS2)-(AT1) II

wherein HS is the helper sequence, AT1 is the first affinity tag, CS1 is the first cleavage sequence, CS2 is the second cleavage sequence and XTEN is the extended recombinant polypeptide.

[0265] In another embodiment, wherein the composition has the configuration of formula III:

(HS)-(AT1)-(CS1)-(XTEN)-(CS2)-(AT2) III

wherein HS is the helper sequence, AT1 is the first affinity tag, AT2 is the second affinity tag, CS1 is the first cleavage sequence, CS2 is the second cleavage sequence and XTEN is the extended recombinant polypeptide.

[0266] The polypeptide constructs comprising affinity tags have the advantageous property, compared to XTEN not linked to affinity tags, of being able to be purified to substantially homogeneous length by use of chromatography substrates to which the affinity tags will bind. In some embodiments, the categories of chromatography substrates used in the method of purification are selected from the chromatography substrates set forth in Table 7, which are utilized for the purification of XTEN linked to the corresponding the indicated affinity tag in the tables. As will be appreciated by one of skill in the art, the categories of chromatography substrate can encompass different chemical groups linked to different matrices or resins; e.g., anion exchange substrates include quaternary trimethylammonium and diethylaminoethyl bound to resins, cation exchange substrates include sulfo or sulfopropyl or carboxymethyl or phosphate groups bound to resins, HIC substrates include ethyl, isopropyl, butyl, phenyl or octyl groups bound to resins, and IMAC substrates include iminodiacetic acid and nitriloacetic acid groups bound to resins. The foregoing substrates are listed for illustrative purposes and are not intended to limit the scope of substrates that can be employed to practice the invention.

[0267] In some embodiments, the invention provides substantially homogeneous XTEN prepared from the a polypeptide comprising an XTEN fused to a first or a first and a second affinity tag by cleavage sequences (such as, but not limited to the cleavage sequences of Table 8) capable of being cleaved by a protease, wherein the preparation is treated with the protease to cleave the cleavage sequences to release the XTEN from the polypeptide, followed by a chromatography step to bind and then elute, and then recover the substantially homogeneous XTEN. In one embodiment of the foregoing, the protease is trypsin and the cleavage sequences are capable of being cleaved by trypsin, non-limiting examples of which are listed in Tables 11 and 15. In another embodiment of the foregoing, the protease is TEV and the cleavage sequences are capable of being cleaved by TEV. In another embodiment of the foregoing, the cleaved XTEN is purified by binding to MacoCap SP chromatography substrate followed by elution with a salt or buffer solution such as, but not limited to, sodium phosphate/NaCl, resulting in the substantially homogenous XTEN. As used in the context of XTEN and/or polypeptides comprising XTEN, a preparation that is “substantially purified” means that at least about 85%, and more preferably at least about 90%, and more preferably at least about 91%, and more preferably at least about 92%, and more preferably at least about 93%, and more preferably at least about 94%, and more preferably at least about 95% or more of the individual molecules of a given preparation have identical sequence length; in other words, the same number of amino acids. The methods that can be utilized to assay for homogeneity of length include mass spectroscopy, size exclusion chromatography/HPLC, or SDS-PAGE followed by silver staining; the methods can be used individually or collectively to quantitate the degree of homogeneity. A generalized scheme for purification of polypeptides comprising XTEN with affinity tag sequences optimized for purification is shown in FIGS. 41-42. After purification the tags can be proteolytically cleaved (FIG. 41B) or retained (FIG. 41C). The XTEN can be purified from contaminants due to the unique amino acid composition of XTEN, as illustrated in FIG. 42.

[0268] In one embodiment, the invention provides a method to produce a substantially purified preparation of a polypeptide comprising an XTEN, comprising the steps of designing a gene encoding an XTEN and a first affinity tag, creating an expression vector suitable for transforming a host cell comprising the encoding gene operably linked to control sequences, transforming the host cell with the expression vector, culturing the host cell under conditions suitable for the expression of the XTEN with linked affinity tag, subjecting the crude expression product to a purification process that comprises an affinity purification step wherein the crude expression product is loaded onto a first chromatography substrate that selectively binds the first affinity tag, washing the chromatography substrate to elute material not bound to the chromatography substrate, eluting the retained protein under appropriate conditions and recovering the eluate wherein the recovered polypeptide is substantially homogeneous in length. In another embodiment, the invention provides a method to produce a substantially homogeneous preparation of a polypeptide comprising an XTEN, comprising the steps of designing a gene encoding an XTEN comprising a first and a second affinity tag, creating an expression vector suitable for transforming a host cell comprising the encoding gene operably linked to control sequences, transforming the host cell with the expression vector, culturing the host cell under conditions suitable for the expression of the polypeptide, subjecting the crude expression product to a purification process that comprises an affinity purification step wherein the lysate is loaded onto a first chromatography substrate that selectively binds the first affinity tag, washing the chromatography substrate to elute material not bound to the chromatography substrate, eluting the retained protein under appropriate conditions and recovering the eluate, loading the recovered XTEN polypeptide onto a second chromatography substrate under conditions effective to capture the polypeptide with the second affinity tag onto the chromatography substrate, washing the chromatography substrate to elute material not bound to the chromatography substrate, eluting the XTEN polypeptide under conditions effective to elute the XTEN polypeptide with the second affinity tag, recovering the eluate containing the polypeptide comprising the XTEN polypeptide with the first and the second affinity tag wherein the recovered polypeptide is substantially homogeneous in length. In yet another embodiment, the invention provides a method to produce a substantially homogeneous preparation of a polypeptide comprising an XTEN, comprising the steps of designing a gene encoding an XTEN comprising a first affinity tag linked by a cleavage sequence to the N-terminus of the encoded XTEN and a second affinity tag linked by a cleavage sequence to the C-terminus of the encoded XTEN, creating an expression vector suitable for transforming a host cell comprising the encoding gene operably linked to control sequences, transforming the host cell with the expression vector, culturing the host cell under conditions suitable for the expression of the polypeptide, subjecting the crude expression product to a purification process that comprises an affinity purification step wherein the lysate is loaded onto a first chromatography substrate that selectively binds the first affinity tag, washing the chromatography substrate to elute material not bound to the chromatography substrate, eluting the retained protein under appropriate conditions and recovering the eluate, loading the recovered polypeptide onto a second chromatography substrate under conditions effective to capture the polypeptide with the second affinity tag onto the chromatography substrate, washing the chromatography substrate to elute material not bound to the chromatography substrate, eluting the polypeptide under conditions effective to elute the polypeptide with the second affinity tag, then treating the recovered polypeptide with a protease under conditions effective to release the XTEN from the polypeptide and loading the material onto a chromatography substrate capable of capturing the XTEN but not the affinity tags, washing the chromatography substrate to elute material not bound to the chromatography substrate, eluting the XTEN, recovering the eluate containing the XTEN polypeptide wherein the recovered XTEN is substantially homogeneous in length. In one embodiment of the foregoing methods described in this paragraph, the first and second affinity tags are selected from the group of affinity tags set forth in Table 7. In one embodiment of the method, the first affinity tag linked to the XTEN as a fusion protein comprises the sequence RPRPRPRPRPRPR (SEQ ID NO: 17) and the chromatography substrate used to bind the polypeptide is MacroCap SP. In another embodiment of the foregoing methods, the first affinity tag linked to a first terminus of the XTEN as a fusion protein comprises the sequence RPRPRPRPRPRPRPRPRPRPRPR (SEQ ID NO: 19), the second affinity tag linked to a second terminus of the XTEN comprises the sequence HHHHHHHH (SEQ ID NO: 20), the first chromatography substrate used to bind the polypeptide is MacroCap SP, and the second chromatography substrate used to bind the polypeptide is a immobilized metal on affinity (IMAC) substrate. In another embodiment of the foregoing methods, the first affinity tag fused to a cleavage sequence fused to a first terminus of the XTEN as a fusion protein comprises the sequence RPRPRPRPRPRPR (SEQ ID NO: 17) or RPRPRPRPRPRPRPRPRPRPRPR (SEQ ID NO: 19), the second affinity tag fused to a cleavage sequence to a second terminus of the XTEN comprises the sequence HHHHHH (SEQ ID NO: 18) or HHHHHHHH (SEQ ID NO: 20), the first chromatography substrate used to bind the polypeptide is MacroCap SP, the second chromatography substrate used to bind the polypeptide is a immobilized metal on affinity (IMAC) substrate, the cleavage sequences comprise an arginine or lysine (including, but not limited to the sequences of Tables 8 and 9) and are cleaved by trypsin, and Macrocap Q is the chromatography substrate used to bind the XTEN freed from the affinity tags or, in the alternative, the freed XTEN is captures as flow-through by passing the protease-treated preparation through one or more of cation exchange, HIC and/or IMAC to capture the cleavage products and protease, leaving the XTEN in the flow-through, which is then recovered as a substantially homogeneous preparation.

[0269] It will be appreciated by one of skill in the art that the order and specific conditions of the steps of the method will vary depending on the composition of the XTEN-affinity tag polypeptide as well as the starting expression level and degree of contamination of truncated contaminants. For example, with certain XTEN compositions, the use of a single affinity tag linked to the XTEN will be sufficient to achieve a preparation in which the polypeptide molecules are substantially homogeneous in length. In such cases, in one embodiment the single affinity tag is selected from the affinity tags set forth in Table 7. With other XTEN compositions, the use of a first and a second affinity tag will be sufficient to achieve a preparation in which the polypeptide molecules are substantially homogeneous in length and in such cases, in one embodiment, the first and second affinity tags are different and each is selected from the affinity tags set forth in Table 7. It will be further appreciated by one of skill in the art that once the polypeptides comprising cleavage sequences are purified, the recovered polypeptide can be subsequently treated by proteolysis to release the one or two affinity tags, followed by passing the treated XTEN through a chromatography substrate to recover the XTEN without linked affinity tags. A schematic of the method is illustrated in FIG. 42 and exemplary methodologies are described in the Examples. Many different proteases can be utilized for the release of terminal purification tags, depending on the sequence linking the affinity tag to the XTEN, including but not limited to a protease selected from Table 9. In one embodiment, the protease is selected from the group consisting of trypsin, chymotrypsin, tobacco etch mosaic virus protease (TEV), FXa, and enterokinase. In another embodiment, the cleavage sequence incorporated into the polypeptide comprises an arginine residue that can be cleaved and the affinity tag removed by treatment with trypsin, thereby releasing the XTEN that is subsequently recovered in substantially purified form by chromatography such as, by capture using anion exchange (including but not limited to, MacroCap Q) or recovered as flow-through wherein the non-XTEN cleavage products and protease are captured by one or more of HIC, cation exchange, or IMAC chromatography, leaving substantially homogeneous XTEN in the flow-through.

TABLE 7
Affinity Tags and Chromatography Substrate Categories that Bind Affinity Tags

| | SEQ ID | Chromatography |
|---|---|---|
| Affinity Tag Amino Acid Sequence | NO: | Substrate |
| LYPYPYP, LYYYPP, WPWP, FPFPFP | 413-416 | HIC |
| (Y)ₙ, (W)ₙ, (YP)ₙ, (WP)ₙ, (FP)ₙ, (LP)n with n = 3-20 | 417-422 | HIC |
| (RP)ₙ, (KP)ₙ, (HP)ₙ, (H)ₙ, (R)ₙ with n = 3-20 | 423-427 | Cation exchange, |
| | | IMAC |
| (E)ₙ, (D)ₙ, (ED)ₙ, (EP)ₙ, (DP)n with n = 3-20 | 428-432 | Anion exchange |
| RPRPRPRPRP | 433 | Cation exchange |
| RPRPRPRPRPGR | 434 | Cation exchange |
| RPRPRPRPRPRPRP | 435 | Cation exchange |
| RPRPRPRPRPRPRPGR | 436 | Cation exchange |
| KPKPKPKPKP | 437 | Cation exchange |
| KPKPKPKPKPGR | 438 | Cation exchange |
| RPRPRPRPRPRPRPRPRP | 439 | Cation exchange |
| RPRPRPRPRPRPRPRPRPGR | 440 | Cation exchange |
| RPRPRPRPRPRPRPRPRPRPRP | 441 | Cation exchange |
| RPRPRPRPRPRPRPRPRPRPRPGR | 442 | Cation exchange |
| RPRPRPRPRPRPRPRPRPRPRPRPRPRP | 443 | Cation exchange |
| RPRPKPRPKPRPKPRPKP | 444 | Cation exchange |
| PRPKPRPKPRPKPRPKPGR | 445 | Cation exchange |
| RPRPKPRPKPRPKPRPKPRPKP | 446 | Cation exchange |
| RPRPKPRPKPRPKPRPKPRPKPGR | 447 | Cation exchange |
| GSPYGYPYSYS, GSPWGSPTSTE, GSPAGSPTSTE, | 448-450 | HIC |
| GSPXGXPXSXS, GSPSGXPXSXS, GSPSGTPXSXS | 451-453 | HIC |
| where X = Ile, Leu, Val, Phe, Trp, or Tyr | | |
| GSPXGXPXSXS, GSPSGXPXSXS, GSPSGTPXSXS | 454-456 | Cation exchange, |
| where X = Arg, Lys, or His | | IMAC |
| HHHHHH, HHHHHHHH | 18 and 20 | IMAC |
| STRPSRRSRRG, STRRGTRRGTRRG, | 457-458 | Cation exchange |
| STRPSRGRARG, STRPSRRARG, STRPSRRRRG, | 459-461 | Cation exchange |
| STEPSEESEEG, STEEGTEEGTEEG, | 462-463 | Anion exchange |
| STEPSEGEAEG, STEPSEEAEG, STEPSEEEEG, | 464-466 | Anion exchange |

TABLE 8
Trypsin Cleavage Sequences

| P4 | P3 | P2 | P1 | P1′ | P2′ | SEQ ID NO: |
|---|---|---|---|---|---|---|
| S | A | S | R | S | A | 467 |
| S | A | S | K | S | A | 468 |
| G | S | G | R | A | T | 469 |
| E | A | A | R | H | H | 470 |
| A | P | G | R | H | H | 471 |
| G | S | G | R | G | S | 472 |
| | | | R | X* | | |
| | | | K | X* | | |

*X = any L-amino acid other than proline

TABLE 9
Proteases and Protease Cleavage Sequences

| | Exemplary | SEQ | | SEQ |
|---|---|---|---|---|
| Protease Acting | Cleavage | ID | | ID |
| Upon Sequence | Sequence | NO: | Cleavage Sequences* | NO: |
| FXIa | KLTR↓AET | 473 | KD/FL/T/R↓VA/VE/GT/GV | |
| FXIa | DFTR↓VVG | 474 | KD/FL/T/R↓VA/VE/GT/GV | |
| FXIIa | TMTR↓IVGG | 475 | | |
| Kallikrein | SPFR↓STGG | 476 | -/-/FL/RY↓SR/RT/-/- | |
| FVIIa | LQVR↓IVGG | 477 | | |
| FIXa | PLGR↓IVGG | 478 | -/-/G/R↓-/-/-/- | |
| FXa | IEGR↓TVGG | 479 | IA/E/GFP/R↓STI/VFS/-/G | |
| FIIa (thrombin) | LTPR↓SLLV | 480 | -/-/PLA/R↓SAG/-/-/- | |
| Elastase-2 | LGPV↓SGVP | 481 | -/-/-/VIAT↓-/-/-/- | |
| Granzyme-B | VAGD↓SLEE | 482 | V/-/-/D↓-/-/-/- | |
| MMP-12 | GPAG↓LGGA | 483 | G/PA/-/G↓L/-/G/- | 491 |
| MMP-13 | GPAG↓LRGA | 484 | G/P/-/G↓L/-/GA/- | 492 |
| MMP-17 | APLG↓LRLR | 485 | -/PS/-/-↓LQ/-/LT/- | |
| MMP-20 | PALP↓LVAQ | 486 | | |
| TEV | ENLYFQ↓G | 487 | ENLYFQ↓G/S | 493 |
| Enterokinase | DDDK↓IVGG | 488 | DDDK↓IVGG | 488 |
| Protease 3C | LEVLFQ↓GP | 489 | LEVLFQ↓GP | 489 |
| (PreScission ™) | | | | |
| Sortase A | LPKT↓GSES | 490 | L/P/KEAD/T↓G/-/EKS/S | 494 |
| Trypsin | K↓X** or R↓X | | K/X or R/X | |
| Trypsin | R↓X** | | SASRSA | 21 |

↓indicates cleavage site
*the listing of multiple amino acids before, between, or after a slash indicate alternative amino acids that can be substituted at the position; ″-″ indicates that any amino acid may be substituted for the corresponding amino acid indicated in the middle column
**x is any L-amino acid other than proline

[0270] In another embodiment, XTEN can be designed such that one or both affinity tags linked to the termini and used to facilitate purification can remain part of the final product, eliminating the requirement for a protease release step. If purification tags are designed to remain a part of a drug product, then tag sequences are selected that do not elicit a pronounced immune response. Immunogenicity can be predicted using computational prediction algorithms or experimental assays. Sequence, that avoid T-cell and B-cell epitopes are preferred. Non-limiting examples of sequences incorporated into the terminus of XTEN sequences that facilitate capture and that may optionally remain associated with the conjugate constructs are provided in Table 7.

### 10. Compositions for Increased Expression of XTEN

[0271] In another aspect, the invention provides constructs comprising polynucleic acid sequences encoding XTEN and methods of making the XTEN for use in the subject conjugates in which additional encoding polynucleotide helper sequences are added to the 5′ end of polynucleotides encoding the XTEN or are added to the 5′ end of sequences encoding an affinity tag linked to the 5′ end of sequences encoding an XTEN to enhance and facilitate the expression of the XTEN or XTEN with cleavage sequences linked to affinity tag polypeptides in transformed host cells, such as bacteria. Examples of such encoded helper sequences are given in Table 10 and in the Examples. In one embodiment, the invention provides a polynucleotide sequence construct encoding a polypeptide comprising a helper sequence having at least about 80%, or at least about 90%, or at least about 95%, or at least about 96%, or at least about 97%, or at least about 98%, or at least about 99% sequence identity to a sequence selected from Table 10 linked to the N-terminus of a first affinity tag selected from the group of sequences set forth in Table 7 that, in turn, is either linked to a cleavage sequence described herein or directly to the N-terminus of an XTEN having at least about 90%, or at least about 91%, or at least about 92%, or at least about 93%, or at least about 94% sequence identity, or at least about 95%, or at least about 96%, or at least about 97%, or at least about 98%, or at least about 99% to a sequence selected from the group of sequences set forth in Tables 2 and 3. The invention provides expression vectors encoding the constructs useful in methods to produce substantially homogeneous preparations of polypeptides and XTEN at high expression levels. In some embodiments, the invention provides methods for producing a substantially homogenous population of polypeptides comprising an XTEN and a first and a second affinity tag and a helper sequence, the method comprising culturing in a fermentation reaction a host cell that comprises a vector encoding a polypeptide comprising an XTEN and the first and second affinity tag under conditions effective to express the polypeptide such that more than about 2 g/L, or more than about 3 g/L, or more than about 4 g/L, or more than about 5 g/L, or more than about 6 g/L, or more than about 7 grams per liter (7 g/L) of the polypeptide is produced as a component of a crude expression product of the host cell when the fermentation reaction reaches an optical density of at least 130 at a wavelength of 600 nm. In one embodiment, the method further comprises the steps of adsorbing the polypeptide onto a first chromatography substrate under conditions effective to capture the first affinity tag of the polypeptide onto the chromatography substrate; eluting and recovering the polypeptide; adsorbing the polypeptide onto a second chromatography substrate under conditions effective to capture the second affinity tag of the polypeptide onto the chromatography substrate; eluting the polypeptide; and recovering the substantially homogeneous polypeptide preparation. In one embodiment of the foregoing method, the vector further comprises nucleotides encoding a helper sequence at the N-terminus of the encoded polypeptide wherein the helper sequence has at least 80%, or at least 90%, or at least 95% sequence identity to a sequence set forth in Table 10. In other embodiments, the invention provides methods for producing a substantially homogenous population of polypeptides comprising an XTEN and a first and a second affinity tag and a helper sequence, the method comprising culturing in a fermentation reaction a host cell that comprises a vector encoding a polypeptide comprising an XTEN and the first and second affinity tag under conditions effective to express the polypeptide product at a concentration of more than about 10 milligrams/gram of dry weight host cell (mg/g), or at least about 250 micromoles/L, or about 300 micromoles/L, or about 350 micromoles/L, or about 400 micromoles/L, or about 450 micromoles/L, or about 500 micromoles/L of said polypeptide when the fermentation reaction reaches an optical density of at least 130 at a wavelength of 600 nm. In one embodiment of the foregoing, the method further comprises the steps of adsorbing the polypeptide onto a first chromatography substrate under conditions effective to capture the first affinity tag of the polypeptide onto the chromatography substrate; eluting and recovering the polypeptide; adsorbing the polypeptide onto a second chromatography substrate under conditions effective to capture the second affinity tag of the polypeptide onto the chromatography substrate; eluting the polypeptide; and recovering the substantially homogeneous polypeptide preparation. In one embodiment of the foregoing method, the vector further comprises nucleotides encoding a helper sequence at the N-terminus of the encoded polypeptide wherein the helper sequence has at least 80%, or at least 90%, or at least 95% sequence identity to a sequence set forth in Table 10. In other embodiments, the invention provides methods for producing a substantially homogenous population of polypeptides comprising an XTEN and a first and a second affinity tag and a helper sequence, the method comprising culturing in a fermentation reaction a host cell that comprises a vector encoding a polypeptide comprising an XTEN and the first and second affinity tag under conditions effective to express the polypeptide product at a concentration of more than about 10 milligrams/gram of dry weight host cell (mg/g), or at least about 15 mg/g, or at least about 20 mg/g, or at least about 25 mg/g, or at least about 30 mg/g, or at least about 40 mg/g, or at least about 50 mg/g of said polypeptide when the fermentation reaction reaches an optical density of at least 130 at a wavelength of 600 nm. In one embodiment of the foregoing, the method further comprises the steps of adsorbing the polypeptide onto a first chromatography substrate under conditions effective to capture the first affinity tag of the polypeptide onto the chromatography substrate; eluting and recovering the polypeptide; adsorbing the polypeptide onto a second chromatography substrate under conditions effective to capture the second affinity tag of the polypeptide onto the chromatography substrate; eluting the polypeptide; and recovering the substantially homogeneous polypeptide preparation. In one embodiment of the foregoing method, the vector further comprises nucleotides encoding a helper sequence at the N-terminus of the encoded polypeptide wherein the helper sequence has at least 80%, or at least 90%, or at least 95% sequence identity to a sequence set forth in Table 10. In another embodiment, the constructs of the foregoing methods of the paragraph further comprise nucleotides encoding protease cleavage sequences between the affinity tags and the XTEN and the method provides that the recovered polypeptides of the preparation are treated with a protease capable of cleaving the cleavage sequences, such as but not limited to trypsin, thereby releasing the XTEN from the polypeptide; the XTEN is adsorbed onto a chromatography substrate under conditions effective to capture the XTEN; the XTEN is then eluted and recovered as a substantially homogeneous XTEN.

TABLE 10
Examples of helper sequences to facilitate protein expression, secretion and
processing in bacteria

| | SEQ ID | Amino Acid at Position** | | | | | |
|---|---|---|---|---|---|---|---|
| Amino Acid Sequence* | NO: | X1 | X2 | X3 | X4 | X5 | Z |
| ADAQKAADNKKP | 495 | | | | | | |
| KTLVYCSEGSPE | 496 | | | | | | |
| ENNAQTTNESAG | 497 | | | | | | |
| KDTIALVVSTLN | 498 | | | | | | |
| APKDNTWYTGA | 499 | | | | | | |
| ADVPAGVTLAEK | 500 | | | | | | |
| KIEEGKLVIWIN | 501 | | | | | | |
| AEATTAAGGA | 502 | | | | | | |
| ATGTATSEGSPE | 503 | | | | | | |
| EPTAATTGESAG | 504 | | | | | | |
| AETTAPAGST | 505 | | | | | | |
| APTEATAGTGA | 506 | | | | | | |
| AETPAGATGAE | 507 | | | | | | |
| APEEGTAGGA | 508 | | | | | | |
| SLSTEATAKIVSEFGRDAN | 509 | | | | | | |
| ANPEQLEEQREETRLIIEE | 510 | | | | | | |
| SASTEATAKAASEAGRDAN | 511 | | | | | | |
| ANPEQAEEQREETR | 512 | | | | | | |
| ANPEQAEEQREET | 513 | | | | | | |
| ANPEQAEEQSEET | 514 | | | | | | |
| KNPEQAEEQREET | 515 | | | | | | |
| KNPEQAEEQSEET | 516 | | | | | | |
| KNPEQAEEQAEEQREET | 517 | | | | | | |
| KNPEQAEEQAEEQSEET | 518 | | | | | | |
| KNHEQAEEQAEEQSEET | 519 | | | | | | |
| KKHEQAEEQAEEQSEET | 520 | | | | | | |
| KKPEQAEEQAEEQREET | 521 | | | | | | |
| KNHEQEKEKAEEQSEET | 522 | | | | | | |
| KKQEQEEKKAEEQREET | 523 | | | | | | |
| KNHEKDEKKAEEQSEET | 524 | | | | | | |
| KKQEQEKEQAEEQREET | 525 | | | | | | |
| KNPEQEKEKAEEQREET | 526 | | | | | | |
| KKPEQEEKQAEEQREET | 527 | | | | | | |
| KKQEQEKEQAEEQAESEREET | 528 | | | | | | |
| KKQEQEKEQAEEQSQSQREET | 529 | | | | | | |
| KKQEQEKEQAEEQSESEREET | 530 | | | | | | |
| KKQEQEKEQAEEQAKAESEAEREET | 531 | | | | | | |
| KKQEQEKEQAEEQSKSQAEAEREET | 532 | | | | | | |
| KKQEQEKEQAEEQAQAQAEDEREET | 533 | | | | | | |
| KKQEQEKEQAEEQSKSKAEDEREET | 534 | | | | | | |
| KKQEQEKEQAEEQPEVQREET | 535 | | | | | | |
| KKQEQEKEQAEEQVENPREET | 536 | | | | | | |
| KKQEQEKEQAEEQELCEREET | 537 | | | | | | |
| KKQEQEKEQAEEQGIDTREET | 538 | | | | | | |
| KNPEQAEEQX1EET | 1 | S/R | | | | | |
| ANPEQAEEQX1EET | 2 | S/R | | | | | |
| KNPEQAEEQAEEQX1EET | 3 | S/R | | | | | |
| KX2X3EQAEEQAEEQX1EET | 4 | S/R | K/N | K/N/T/Q/H/P/E/D/A/R/S | | | |
| KX2(X3)₁₀QX1EET | 5 | S/R | K/N | K/N/T/Q/H/P/E/D/A/R/S | | | |
| KX2(X3)₇AEEQX1EET | 6 | S/R | K/N | K/N/T/Q/H/P/E/D/A/R/S | | | |
| KX2X3EQE(X3)₃AEEQREET | 7 | | K/N | K/N/T/Q/H/P/E/D/A/R/S | | | |
| KX2X3EQE(X3)₃AEE(X3)₅ | 8 | | K/N | K/N/T/Q/H/P/E/D/A/R/S | | | |
| KKQEQEKEQAEEQ(X4X5)₂REET | 9 | | | | A/S | K/Q/E | |
| KKQEQEKEQAEEQ(X4X5)₄REET | 10 | | | | A/S | K/Q/E | |
| KKQEQEKEQAEEQ(Z)₄REET | 11 | | | | | | any |
| KX2(X3)ₙ, where n = 10-40 | 12 | | K/N | K/N/T/Q/H/P/E/D/A/R/S | | | |
| (X3)ₙ, where n = 10-50 | 13 | | | K/N/T/Q/H/P/E/D/A/R/S | | | |
| KX2QEQEKEQAEEQ(X4X5)ₙX1EET, | 14 | S/R | K/N | | A/S | K/Q/E | |
| where n = 0-10 | | | | | | | |
| KX2(X3)ₙ(X4X5)ₘX1EET, where n = | 15 | S/R | K/N | K/N/T/Q/H/P/E/D/A/R/S | A/S | K/Q/E | |
| 5-20 and m = 0-10 | | | | | | | |
| KX2(X3)ₙ(Z)ₘX1EET, where n = 5-20 | 16 | S/R | K/N | K/N/T/Q/H/P/E/D/A/R/S | | | any |
| and m = 0-10 | | | | | | | |

*where n or m = 0, the adjoining amino acids are contiguous
**indicates the amino acid(s) that can be utilized at the given position in the amino acid sequence entries, with the alternatives separated by ″/″

### III). Payloads

[0272] The present invention relates in part to XTEN conjugates linked to one or more payload molecules. It is contemplated that XTEN can be linked to a broad diversity of payload molecules, including biologically active peptides, proteins, polymers, pharmacologically active small-molecules, polynucleic acids, targeting peptides and proteins, targeting small molecules, antibodies and antibody fragments, and imaging small-molecule payloads, as well as combinations of these types of payloads resulting in compositions with 2, 3, 4 or more types of payloads. The invention addresses a long-felt need in increasing the terminal half-life of exogenously administered therapeutic and diagnostic payloads to a subject in need thereof, as well as combinations of payloads that may include a therapeutic component and a targeting component.

[0273] Non-limiting examples of functional classes of pharmacologically active payload agents for use in linking to an XTEN of the invention may be any one or more of the following: hypnotics and sedatives, psychic energizers, tranquilizers, respiratory drugs, anticonvulsants, muscle relaxants, antiparkinson agents (dopamine antagnonists), analgesics, anti-inflammatories, antianxiety drugs (anxiolytics), appetite suppressants, antimigraine agents, muscle contractants, anti-infectives (antibiotics, antivirals, antifungals, vaccines), antiarthritics, antimalarials, antiemetics, anepileptics, bronchodilators, coagulation factors, cytokines, chemokines, interleukins, growth factors, growth hormones, endocrine hormones, exocrine hormones, insulin, glucose-regulating peptides, anti-cancer agents, antithrombotic agents, antihypertensives, cardiovascular drugs, antiarrhythmics, antioxicants, anti-asthma agents, hormonal agents (including contraceptives), sympathomimetics, diuretics, lipid regulating agents, antiandrogenic agents, antiparasitics, anticoagulants, neoplastics, antineoplastics, hypoglycemics, nutritional agents and supplements, growth supplements, antienteritis agents, vaccines, antibodies, diagnostic agents, contrasting agents, and radioactive imaging agents.

[0274] More particularly, the active payload may fall into one of a number of structural classes, including but not limited to small molecule drugs, biologically active proteins (peptides, polypeptides, proteins, recombinant proteins, antibodies, and glycoproteins), steroids, nucleotides, oligonucleotides, polynucleotides, fats, electrolytes, and the like. For the XTEN-payload conjugation compositions, it is specifically contemplated that a payload can be a pharmacologically active agent that possesses a suitably reactive functional group, including, but not limited to a native amino group, a sulfydryl group, a carboxyl group, an aldehyde group, a ketone group, an alkene group, an alkyne group, an azide group, an alcohol group, a heterocycle, or, alternatively, is modified to contain at least one of the foregoing reactive groups suitable for coupling to either an XTEN, XTEN-cross-linker, or XTEN-click-chemistry reactant of the invention using any of the conjugation methods described herein or are otherwise known to be useful in the art for conjugating such reactive groups. Specific functional moieties and their reactivities are described in Organic Chemistry, 2nd Ed. Thomas Sorrell, University Science Books, Herndon, VA (2005). Further, it will be understood that any payload containing a reactive group or that is modified to contain a reactive group will also contain a residue after conjugation to which either the XTEN, the XTEN-cross-linker, or the XTEN-click-chemistry reactant is linked.

[0275] Exemplary payloads suitable for covalent attachment to either an XTEN polymer, XTEN-cross-linker, or XTEN-click-chemistry reactant include biologically active proteins and pharmacologically active small molecule drugs with activity. Exemplary drugs suitable for the inventive compositions can be found as set forth in the official United States Pharmacopeia, official Homeopathic Pharmacopeia of the United States, or official National Formulary, in the Physician's Desk Reference (PDR) and in the Orange Book maintained by the U.S. Food and Drug Administration (FDA). Preferred drugs are those having the needed reactive functional group or those that can be readily derivatized to provide the reactive functional group for conjugation and will retain at least a portion of the pharmacologic activity of the unconjugated payload when conjugated to XTEN.

[0276] 1. Drugs as Payloads

[0277] In some embodiments, the drug payload for conjugation to either the subject XTEN, the XTEN-cross-linkers, or the XTEN-click-chemistry reactants described herein is one or more agents described herein or selected from the payloads of Table 11, or a pharmaceutically acceptable salt, acid or derivative or agonist thereof. In one embodiment, the drug is derivatized to introduce a reactive group for conjugation to the subject XTEN, the XTEN-cross-linkers, or the XTEN-click-chemistry reactants described herein. In another embodiment, the drug for conjugation is derivatized to introduce a cleavable linker such as, but not limited to, valine-citrulline-PAB, wherein the linker is capable of being cleaved by a circulating or an intracellular protease after administration to a subject, thereby freeing the drug from the conjugate.

TABLE 11
Drugs for Conjugation to XTEN
Drugs

Erlotinib; Bortezomib; Alitretinoin, Allopurinol, arsenic trioxide, clofarabine, dexrazoxane,
Fulvestrant; Sutent (SU11248), Letrozole; Imatinib mesylate; PTK787/ZK 222584; Bendamustine;
Romidepsin; Pralatrexate; Cabazitaxel (XRP-6258); Everolimus (RAD-001); Abirateron; Oxaliplatin; 5-
FU (5-fluorouracil), leucovorin, rapamycin; lapatinib; lonafarnib; sorafenib; gefitinib; cyclosphosphamide;
busulfan; improsulfan; piposulfan; benzodopa; carboquone; meturedopa; uredopa; altretamine;
triethylenemelamine; triethylenephosphoramide; triethylenethiophosphoramide; trimethylomelamine;
bullatacin; bullatacinone; camptothecin; topotecan; bryostatin; callystatin; CC-1065; adozelesin;
calicheamycin; auristatin; monomethyl auristatin E (MMAE); monomethyl auristatin F (MMAF); (valine-
citrulline-PAB)-monomethyl auristatin E; (valine-citrulline-PAB)-monomethyl auristatin F; carzelesin;
bizelesin; cryptophycins (particularly cryptophycin 1 and cryptophycin 8); dolastatin; duocarmycin;
eleutherobin; pancratistatin; sarcodictyin; spongistatin; chlorambucil; chlornaphazine; cholophosphamide;
estramustine; ifosfamide; mechlorethamine; mechlorethamine oxide hydrochloride; melphalan;
novembichin; phenesterine; prednimustine; trofosfamide; uracil mustard; carmustine; chlorozotocin;
fotemustine; lomustine; nimustine; ranimnustine; calicheamicin; dynemicin; dynemicin A; clodronate;
esperamicin; neocarzinostatin chromophore; aclacinomysins, actinomycin; anthramycin; azaserine;
bleomycin; cactinomycin; carabicin; carminomycin; carzinophilin; chromomycinis; dactinomycin;
daunorubicin; detorubicin; 6-diazo-5-oxo-L-norleucine; doxorubicin; morpholino-doxorubicin;
lenalidomide, cyanomorpholino-doxorubicin; (valine-citrulline-PAB)-doxorubicin; 2-pyrrolino-
doxorubicin and deoxydoxorubicin; epirubicin; esorubicin; idarubicin; marcellomycin; mitomycin C;
mycophenolic acid; nogalamycin; olivomycin; peplomycin; potfiromycin; puromycin; quelamycin;
rodorubicin; streptonigrin; streptozocin; tubercidin; ubenimex; zinostatin; zorubicin; 5-fluorouracil (5-FU);
fdenopterin; methotrexate; pteropterin; trimetrexate; fludarabine; 6-mercaptopurine; thiamiprine;
ancitabine; azacitidine; 6-azauridine; carmofur; cytarabine; dideoxyuridine; doxifluridine; enocitabine;
meclorethamine, floxuridine; calusterone; dromostanolone propionate; epitiostanol; mepitiostane;
testolactone; aminoglutethimide; trilostane; frolinic acid; aceglatone; aldophosphamide glycoside;
aminolevulinic acid; eniluracil; amsacrine; bestrabucil; bisantrene; edatraxate; defofamine; demecolcine;
diaziquone; elformithine; elliptinium acetate; an epothilone; etoglucid; gallium nitrate; hydroxyurea;
lentinan; lonidainine; maytansine; ansamitocins; mitoguazone; mopidanmol; nitraerine; pentostatin;
phenamet; pirarubicin; losoxantrone; methoxsalen, podophyllinic acid; 2-ethylhydrazide; procarbazine;
razoxane; rhizoxin; ribavirin; zidovudine; acyclovir; gangcyclovir; vidarabine; idoxuridine; trifluridine;
foscarnet; amantadine; rimantadine; saquinavir; indinavir; ritonavir; alpha-interferons and other
interferons; AZT; sizofuran; spirogermanium; tenuazonic acid; triaziquone; 2; 2′,2″-trichlorotriethylamine;
T-2 toxin; verracurin A; roridin A; anguidine); urethan; vindesine; dacarbazine; mannomustine;
mitobronitol; mitolactol; pipobroman; gacytosine; arabinoside (“Ara-C”); cyclophosphamide; thiotepa;
taxoids; epaclitaxel; paclitaxel; docetaxel; doxetaxel; irinotecan; pemetrexed; chloranbucil; gemcitabine; 6-
thioguanine; cisplati; carboplatin; vinblastine; platinum; etoposide, VP-16; ifosfamide; mitoxantrone;
novantrone, teniposide; edatrexate; daunomycin; aminopterin; xeloda; ibandronate; CPT-11;
topoisomerase inhibitor RFS 2000; difluoromethylornithine (DMFO); retinoic acid; capecitabine; mesna,
lidocaine; bupivacaine; memantine; quinacrine, donepezil; rivastigmine; galantamine; morphine;
oxycodone; hydromorphone; oxymorphone; metopon; apomorphine; normorphine; etorphine;
buprenorphine; meperidine; lopermide; anileridine; ethoheptazine; piminidine; betaprodine; diphenoxylate;
fentanil; sufentanil; alfentanil; remifentanil; levorphanol; dextromethorphan; phenazocine; pentazocine;
cyclazocine; methadone; isomethadone; propoxyphene; naloxone; naltrexone; treprostinil; N-
methylnaloxone; 6-amino-14-hydroxy-17-allylnordesomorphine; naltrendol;, N-methylnaltrexone;
nalbuphine; butorphanol; cyclazocine; pentazocine,; nalmephene; naltrindole; nor-binaltorphimine;
oxilorphan; 6-amino-6-desoxo-naloxone; pentazocine; levallorphanmethylnaltrexone; buprenorphine;
cyclorphan; levalorphan; cyclosporine; cyclosporine A; mycophenylate mofetil; sirolimus; tacrolimus;
prednisone; azathioprine; cyclophosphamide; prednisone; aminocaproic acid; chloroquine;
hydroxychloroquine; dexamethasone; chlorambucil; danazol; bromocriptine; Nilotinib (AMN107);
Nelarabine, amifostine, amiodarone, aminocaproic acid, aminohippurate sodium, aminoglutethimide,
aminolevulinic acid, aminosalicylic acid, amsacrine, anagrelide, anastrozole, asparaginase, anthracyclines,
bexarotene, bicalutamide, bleomyein, buserelin, busulfan, cabergoline, capecitabine, carboplatin,
carmustine, chlorambucin, cilastatin sodium, cisplatin, cladribine, clodronate, cyclophosphamide,
cyproterone, cytarabine, camptothecins, 13-cis retinoic acid, all trans retinoic acid; dacarbazine,
dactinomycin, daunorubicin, deferoxamine, dexamethasone, diclofenac, diethylstilbestrol, docetaxel,
doxorubicin, epirubicin, estramustine, etoposide, exemestane, fexofenadine, fludarabine, fludrocortisone,
fluorouracil, fluoxymesterone, flutamide, gemcitabine, epinephrine, L-Dopa, hydroxyurea, idarubicin,
ifosfamide, imatinib, irinotecan, itraconazole, goserelin acetate, letrozole, leucovorin, levamisole,
lisinopril, lovothyroxine sodium, mechlorethamine, medroxyprogesterone, megestrol, melphalan,
metaraminol bitartrate, metoclopramide, mexiletine, mitomycin, mitotane, naloxone, nicotine, nilutamide,
octreotide, pamidronate, pilcamycin, porfimer, prednisone, prochlorperazine, ondansetron, raltitrexed,
sirolimus, tacrolimus, tamoxifen, temozolomide, testosterone, tetrahydrocannabinol, thalidomide,
thioguanine, topotecan, tretinoin, valrubicin, vincristine, vindesine, vinorelbine, dolasetron, granisetron;
formoterol, fluticasone, leuprolide, midazolam, alprazolam, amphotericin B, podophylotoxins, nucleoside
antivirals, aroyl hydrazones, sumatriptan; macrolides such as erythromycin, oleandomycin,
troleandomycin, roxithromycin, clarithromycin, davercin, azithromycin, flurithromycin, dirithromycin,
josamycin, spiromycin, midecamycin, leucomycin, miocamycin, rokitamycin, andazithromycin, and
swinolide A; fluoroquinolones such as ciprofloxacin, ofloxacin, levofloxacin, trovafloxacin, alatrofloxacin,
moxifloxicin, norfloxacin, enoxacin, grepafloxacin, sunitinib, gatifloxacin, lomefloxacin, sparfloxacin,
temafloxacin, pefloxacin, amifloxacin, fleroxacin, tosufloxacin, prulifloxacin, irloxacin, pazufloxacin,
clinafloxacin, and sitafloxacin; aminoglycosides such as gentamicin, netilmicin, paramecin, tobramycin,
amikacin, kanamycin, neomycin, and streptomycin, vancomycin, teicoplanin, rampolanin, mideplanin,
colistin, daptomycin, gramicidin, colistimethate; polymixins such as polymixin B, capreomycin, bacitracin,
penems; penicillins including penicllinase-sensitive agents like penicillin G, penicillin V; penicllinase-
resistant agents like methicillin, oxacillin, cloxacillin, dicloxacillin, floxacillin, nafcillin; gram negative
microorganism active agents like ampicillin, amoxicillin, and hetacillin, cillin, and galampicillin;
antipseudomonal penicillins like carbenicillin, ticarcillin, azlocillin, mezlocillin, and piperacillin;
cephalosporins like cefpodoxime, cefprozil, ceftbuten, ceftizoxime, ceftriaxone, cephalothin, cephapirin,
cephalexin, cephradrine, cefoxitin, cefamandole, cefazolin, cephaloridine, cefaclor, cefadroxil,
cephaloglycin, cefuroxime, ceforanide, cefotaxime, cefatrizine, cephacetrile, cefepime, cefixime,
cefonicid, cefoperazone, cefotetan, cefinetazole, ceftazidime, loracarbef, and moxalactam, monobactams
like aztreonam; and carbapenems such as imipenem, meropenem, pentamidine isethiouate, albuterol
sulfate, lidocaine, metaproterenol sulfate, beclomethasone diprepionate, triamcinolone acetamide,
budesonide acetonide, fluticasone, ipratropium bromide, flunisolide, cromolyn sodium, and ergotamine
tartrate; taxanes such as paclitaxel; SN-38, tyrphostines, 20-epi-1,25 dihydroxy vitaminD3, 5-
ethynyluracil, abiraterone, Acivicin, Aclarubicin, Acodazole Hydrochloride, AcrQnine, acylfulvene,
adecypenol, adramycin, Aldesleukin, ALL-TK antagonists, ambamustine, amidox, Ambomycin,
Ametantrone Acetate, amrubicin, andrographolide, angiogenesis inhibitors, antagonist D, antagonist G,
antarelix, anti-androgen, anti-dorselizing morphogenetic protein-1, anti-estrogen, antimetabolites, anti-
neoplaston, anti-oestrogens, anti-sense oligonucleotides, anti-venom, aphidicolinglycinate, apoptosis gene
modulators, apoptosis regulators, apurinic acid, ara-CDP-DL-PTBA, arginine deaminase, Asperlin,
asulacrine, atamestane, atrimustine, atrsacrine, axinastatin 1, axinastatin 2, axinastatin 3, azasetron,
azatoxin, azatyrosine, Azptepa: Azotomycin, baccatin III derivatives, balanol, Batimastat,
BCR/ABLantagonists, benzochlorins, Benzodepa, benzoylstaurosporine, staurosporine, beta-alethine,
betaclamycin B, betalactamderivatives, betamethasone, betulinic acid, bFGFinhibitor, Bicalutamide,
Bisantrene Hydrochloride, bisaziridinylspermine, bisnafide, Bisnafide Dimesylate, bistrateneA, Bleomycin
Sulfate, breflate, Brequinar Sodium, bromine epiandrosterone, Bropirimine, budotitane, buthionine
sulfoximine, calcipotriol, calphostin C, camptothecin derivatives, canarypox IL-2, capedtabine,
Caracemide, Carbetimer, carboxamide-amino-triazole: carboxyamidotriazole, CaRestM3, CARN700,
cartilage derived inhibitor, Carubicin Hydrochloride, casein kinase inhibitors(ICOS), castanospermine,
cecropin B, Cedefingol, cetrorelix, chlorins, chloroquinoxaline sulfonamide, , chlorotrianisene, cicaprost,
Cirolemycin, cis-porphyrin, clomifene analogues, clotrimazole, collismycin A, collismycin B,
combretastatin A4, combretastatin analogue, conagenin, crambescidin 816, crisnatol, Crisnatol Mesylate,
cryptophycin 8, cryptophycin A derivatives, curacin A, cyclopentanthraquinones, cycloplatam, cypemycin,
cytarabineocfosfate, cytolyticfactor, cytostatin, cytotoxic agents, Daunorubicin Hydrochloride, Decitabine,
dehydrodidemnin B, deslorelin, dexifosfamide, Dexormaplatin, dexrmzoxane, dexverapamil, Dezaguanine,
Dezaguanine Mesylate, DHEA, diaziquorie, dicarbazine, didemnin 13, didox, diethylnorspermine,
dihydro-5-azacytidine: dihydrotaxol,9-, dioxamycin, diphenylspiromustine, docosanol, Doxorubicin
Hydrochloride, Droloxifene, Droloxifene Citrate, Dromostanolone Propionate, dronabinol, Duazomycin,
duocannycin SA, ebselen, ecorustine, edelfosine, edrocolomab, Eflomithine Hydrochloride, eflornithine,
elemene, Elsamitrucin, emitefur, Enloplatin, Enpromate, epiandrosterone, Epipropidine, Epirubicin
Hydrochloride, epristeride, Erbulozole, erythrocyte gene therapy, Esorubicin Hydrochloride, estramustine
analogue, estrogen agonists, estrogen antagonists, Etanidazole, ethinyloestradiol, Ethiodized Oil I131,
Etoposide Phosphate, Etoprine, fadrozole, Fadrozole Hydrochloride, Fazarabine, fazarabine, fenretinide,
Fenretinide: Floxuridine, finasteride, flavopiridol, flezelastine, Fludarabine Phosphate, fluorodaunorunicin
hydrochloride, Flurocitabine, forfenimex, formestane, Fosquidone, fostriecin, Fostriecin Sodium,
gadoliniumtexaphyrin, galocitabine, ganirelix, gelatinase inhibitors: gemcitabine, Gemcitabine
Hydrochloride, glutathione inhibitors, Gold Au198, goserelin, hepsulfam, heregulin,
hexamethylenebisacetamide, hexamethylmelamine, human chorionic gonadotrophin: monophosphoryl lipid
A + myobacterium cell walls k, hypericin, ibandronic acid, Idarubicin Hydrochloride, idoxifene,
idramantone, Ilmofosine, ilomastat, imidazoacridones, imiquimod, immuno stimulant peptides: insulin-like
growth factor-1 receptor inhibitor, interferon agonists, Interferon Alfa-2a, Interferon Alfa-2b, Interferon
Alfa-n1, Interferon Alfa-n3, Interferon Beta-Ia, Interferon Gamma-Ib, iobenguane, iododoxorubicin,
ipomeanol, Iproplatin, Irinotecan Hydrochloride, iroplact, irsogladine, isobengazole, isohomohalicondrin
B, itasetron, jasplakinolide, kahalalide F, lamellarin-Ntriacetate, lanreotide, Lanreotide Acetate,
leinamycin, lenograstim, lentinan sulfate, leptolstatin, leukemia inhibiting factor, leukocyte alpha
interferon, Leuprolide Acetate, leuprolide + estrogen + progesterone, leuprorelin, liarozole, Liarozole
Hydrochloride, linear polyamine analogue, lipophilic disaccharide peptide, lipophilic platinum compounds,
lissoclinamide7, lobaplatin, lombricine, lometrexol, Lometrexol Sodium, lonidamine, Losoxantrone
Hydrochloride, lovastatin, loxoribine, luprolide, lurtotecan, lutetlumtexaphyrin, lysofylline, lyticpeptides,
maitansine, mannostatin A, marimastat, Masoprocol, maspin, matrilysin inhibitors, matrix metallo
proteinase inhibitors, mecaptopurine, Mechlorethamine Hydrochloride, Megestrol Acetate, Melengestrol
Acetate, Menogaril, merbarone, meterelin, methioninase, methlorethamine, Metoprine, Meturedepa,
microalgal, mifepristone, MIFinhibitor, miltefosine, mirimostim, mismatched double stranded RNA,
Mitindomide, Mitocarcin, Mitocromin, Mitogillin, mitoguazone, Mitomalcin, mitomycin analogues,
mitonafide, Mitosper, mitotoxin fibroblast growth factor-saporin, mofarotene, molgramostim, monoclonal
antibody, multiple drug resistance gene inhibitor, multiple tumor suppressor1-based therapy, mustard
anticancer agent, mutamycin, mycaperoxide B, mycobacterial cell wall extract, Mycobacterium bovis,
myriaporone, N-acetyldinaline: N-substitutedbenzamides, nafarelin, nagrestip, naloxone + pentazocine,
napavin, naphterpin, nartograstim, nedaplatin, nemorubicin, neridronic acid, neutral endo peptidase,
nisamycin, nitric oxide modulators, nitrogen mustard derivatives, nitroxide antioxidant, nitrullyn,
Nocodazole: Nogalamycin, O6-benzylguanine, oestradiol, okicenone, oligonucleotides,
onapristone: ondansetron, ondansetron, oracin, oral cytokine inducer, Ormaplatin, osaterone, oxaunomycin,
Oxisuran, palauamine, palmitoylrizoxin, pamidronic acid, panaxytriol, panomifene, parabactin,
pazelliptine: pegaspargase, Pegaspargase, peldesine: pentosanpolysulfatesodium, Peliomycin, Pentamustine,
pentrozole, Peplomycin Sulfate, perflubron, Perfosfamide, perillyl alcohol, phenazinomycin,
phenylacetate, phosphatase inhibitors, picibanil, pilocarpine hydrochloride, piritrexim, Piroxantrone
Hydrochloride, placetin A, placetin B, plasminogen activator inhibitor, platinum complex, platinum
compounds, platinum-triamine complex, Plicamycin, Plomestane, Porfimer Sodium, Procarbazine
Hydrochloride, propylbis-acridone, prostaglandin J2, prostatic carcinoma, proteasome inhibitors, protein
A-based immune modulator, protein kinase C inhibitor, protein tyrosine phosphatase inhibitors, purine
nucleoside phosphorylase inhibitors, Puromycin Hydrochloride, purpurins, Pyrazofurin, pyrazoloacridine,
pyridoxylated hemoglobin polyoxyethylene conjugate, raf antagonists, ramosetron, rasfarnesyl protein
transferase inhibitors, ras inhibitors: ras-GAP inhibitor, retelliptine demethylated, rhenium Re186
etidronate, Riboprine, ribozymes, RII retinamide, RM-131 (ghrelin agonist), RM-493 (agonis for
melanocortin type 4 receptor), Rogletimide, rohitumine, romurtide, roquinimex, rubiginone B1, ruboxyl,
Safingol Hydrochloride, Safingol, saintopin: Sar CNU, sarcophytol A, sargramostim, Sdi1 mimetics,
Semustine, senescence derived inhibitor 1, sense oligonucleotides, signal transduction inhibitors, signal
transduction modulators, Simtrazene, single chain antigen binding protein, sobuzoxane, sodium
borocaptate, sodium phenylacetate, solverol, somatomedin binding protein, sonermin, Sparfosate Sodium,
sparfosic acid, Sparsomycin, Spirogermanium Hydrochloride, Spiromustine, spiromustine: splenopentin,
Spiroplatin, splcamycin D, squalamine, stem cell inhibitor, stem-cell division inhibitors, stipiamide,
stromelysin inhibitors, Strontium Chloride Sr89, sulfmosine, Sulofenur, superactive vasoactive intestinal
peptide antagonist, suradista, suramin, swainsonine, synthetic glycosamino glycans, Talisomycin,
tallimustine, tamoxifen methiodide, tauromustine, tazarotene, Tecogalan Sodium, Tegafur,
tellurapyrylium, telnoporfin, telomerase inhibitors, Teloxantrone Hydrochloride, Temoporfin,
ternozolomide, Teroxirone, tetrachlorodecaoxide, tetrazomine, texotere, thallblastine, thiocoraline,
thrombopoietin mimetic, thymalfasin, thymopoietin receptor agonist, thymotrinan, thyroid stimulating
hormone, Tiazofurin, tinethylotiopurpurin, Tirapazamine, titanocene dichloride, Topotecan Hydrochloride,
topsentin, toremifene, Toremifene Citrate, totipotent stem cell factor, translation inhibitors, Trestolone
Acetate, triacetyluridine, triciribine, Triciribine Phosphate: Trimetrexate, Trimetrexate Glucuronate,
Triptorelin, triptorelin: tropisetron, tubulozole hydrochloride, turosteride, tyrosine kinase inhibitors, UBC
inhibitors, urodepa, urogenital sinus-derived growth inhibitory factor, urokinase receptor antagonists,
vapreotide, variolin B, vector system, velaresol, venom, veramine, verdins, Verleporfin, verteporfin,
Vinblastine Sulfate, vincristine sulfate, vindesine, Vindesine Sulfate, Vinepidine Sulfate, Vinglycinate
Sulfate, Vinleurosine Sulfate, vinorelbine tartrate, vinrosidine sulfate, vinxaltine, Vinzolidine Sulfate,
vitaxin, Vorozole, zanoterone, Zeniplatin, zilascorb, zinostatin stimalamer, Zorubicin Hydrochloride,
Bovine pancreatic RNase, Human pancreatic RNAse, Mammalian pancreatic RNase, onconase, ranpirnase,
pokeweed antiviral protein, rachelmycin, ricin-A chain, gelonin, everolimus, carfilzomib, tubulysin,
tubulysin B, tubulysin M, maytansinoid DM1, maytansinoid DM4, triptolide, SJG-136, apaziquone,
irofulven, illudin S, tomaymycin, zoledronate

[0278] 2. Biologically Active Proteins as Payloads

[0279] In another aspect, the invention provides XTEN-payload compositions in which the payload is a biologically active protein, either as a peptide or polypeptide. In some embodiments of XTEN-payload conjugates, the payload is any pharmacologically active peptide or polypeptide that can be expressed recombinantly as a fusion protein linked to one or more XTEN. In other embodiments of XTEN-payload conjugates, the payload is any pharmacologically active peptide or polypeptide that can be conjugated to one or more XTEN. The conjugates may be in a configuration as described herein, below. The exemplary peptide or polypeptide payloads are meant to encompass analogs, agonists, antagonists, inhibitors, and isomers. It will be understood that the subject peptides and proteins encompass synthetic, semi-synthetic, recombinant, native, glycosylated, and non-glycosylated forms, as well as biologically active fragments, sequence variants, species variants, homologs and mutations thereof as long as the resulting variant protein retains a portion of activity of the parent or native protein.

[0280] Biologically active protein sequences can be obtained from publicly available databases, patents, or literature references and other such sources that are well known in the art. For example, sequences can be obtained from Universal Protein Resource (UniProt)/Swiss-Prot, European Bioinformatics Institute (EBI), the SIB Swiss Institute of Bioinformatics, the Protein Information Resource (PIR). Chemical Abstracts Services (CAS) Registry Numbers (published by the American Chemical Society) and/or GenBank Accession Numbers (e.g., AAA-AZZ, HAA-HZZ, JAA-JZZ), Model Protein identifiers available through the National Center for Biotechnology Information (NCBI) webpage, available on the world wide web at ncbi.nlm.nih.gov that correspond to entries in the CAS Registry or GenBank database that contain an amino acid sequence of the protein of interest or of a fragment or variant of the protein. For such sequence identifiers provided herein, the summary pages associated with each of these CAS and GenBank and GenSeq Accession Numbers as well as the cited journal publications (e.g., PubMed ID number (PMID)) are each incorporated by reference in their entireties, particularly with respect to the amino acid sequences described therein.

[0281] In one embodiment, the XTEN-payload composition, whether in recombinant or conjugate form, comprises one or more molecules of a biologically active peptide or protein that includes, but is not limited to a peptide or polypeptide selected from the payloads set forth in Table 12, or a sequence variant thereof that retains at least a portion of the activity of the biologically active protein. By “sequence variant,” it is meant that the biologically active protein exhibits at least about 80%, or 90%, or 91%, or 92%, or 93%, or 94%, or 95%, or 96%, or 97%, or 98%, or 99 sequence identity, when optimally aligned, to that of the known peptide or polypeptide, such as are listed in Table 12.

TABLE 12
Biologically Active Proteins for linking to XTEN
Protein/Peptide Name

EPO, IFN-α, IFN-β, IFN-γ, consensus IFN, factor VII, factor VIII, factor IX, IL-1, IL-2, REMICADE
(infliximab), RITUXAN (rituximab), ENBREL (etanercept), SYNAGIS (palivizumab), REOPRO
(abciximab), HERCEPTIN (trastuzimab), tPA, CERIZYME (imiglucerase), Hepatitus-B vaccine,
rDNAse, alpha-1 proteinase inhibitor, C-peptide, fuzeon, G-CSF, GM-CSF, growth hormone,
somatropin, growth hormone releasing hormone, insulin, insulin analogues, glucagon, GLP-1, GLP-2,
FSH, TNF-receptor, uricase, VEGF, PTH, aspariginase, amdoxovir (DAPD), antide, becaplermin,
calcitonins, cyanovirin, denileukin diftitox, erythropoietin (EPO), ceredase, cerezyme, alpha-
glucosidase, collagen, cyclosporin, alpha defensins, beta defensins, exendin-4, granulocyte colony
stimulating factor (GCSF), thrombopoietin (TPO), alpha-1 proteinase inhibitor, elcatonin, granulocyte
macrophage colony stimulating factor (GMCSF), fibrinogen, filgrastim, growth hormones human
growth hormone (hGH), growth hormone releasing hormone (GHRH), GRO-beta, GRO-beta antibody,
bone morphogenic proteins such as bone morphogenic protein-2, bone morphogenic protein-6, OP-1;
acidic fibroblast growth factor, basic fibroblast growth factor, CD-40 ligand, heparin, human serum
albumin, low molecular weight heparin (LMWH), interferons such as interferon alpha, interferon beta,
interferon gamma, interferon omega, interferon tau, consensus interferon; interleukins and interleukin
receptors such as interleukin-1 receptor, interleukin-2, interluekin-2 fusion proteins, interleukin-1
receptor antagonist, interleukin-3, interleukin-4, interleukin-4 receptor, interleukin-6, interleukin-8,
interleukin-12, interleukin-13 receptor, interleukin-17 receptor; lactoferrin and lactoferrin fragments,
luteinizing hormone releasing hormone (LHRH), insulin, pro-insulin, insulin analogues (e.g., mono-
acylated insulin as described in U.S. Pat. No. 5,922,675), amylin, somatostatin, somatostatin analogs
including octreotide, vasopressin, follicle stimulating hormone (FSH), influenza vaccine, insulin-like
growth factor (IGF), insulintropin, macrophage colony stimulating factor (M-CSF), plasminogen
activators such as alteplase, urokinase, reteplase, streptokinase, pamiteplase, lanoteplase, and
teneteplase; nerve growth factor (NGF), osteoprotegerin, platelet-derived growth factor, tissue growth
factors, transforming growth factor-1, vascular endothelial growth factor, leukemia inhibiting factor,
keratinocyte growth factor (KGF), glial growth factor (GGF), T Cell receptors, CD molecules/antigens,
tumor necrosis factor (INF), monocyte chemoattractant protein-1, endothelial growth factors,
parathyroid hormone (PTH), thymosin alpha 1, thymosin alpha 1 IIb/IIIa inhibitor, thymosin beta 10,
thymosin beta 9, thymosin beta 4, alpha-1 antitrypsin, phosphodiesterase (PDE) compounds, VLA-4
(very late antigen-4), VLA-4 inhibitors, bisphosponates, respiratory syncytial virus antibody, cystic
fibrosis transmembrane regulator (CFTR) gene, deoxyreibonuclease (Dnase), bactericidal/permeability
increasing protein (BPI), anti-CMV antibody, etanercept, abciximab, afeliomomab, basiliximab,
daclizumab, infliximab, ibritumomab tiuexetan, mitumomab, muromonab-CD3, iodine 131
tositumomab conjugate, olizumab, rituximab, HERCEPTIN (trastuzumab), boxtox, DYSPORT
(abobotulinumtoxinA), alglucosidase alfa, daptomycin, YH-16 , choriogonadotropin alfa, filgrastim,
cetrorelix, interleukin-2, aldesleukin, teceleukin, denileukin diftitox, interferon alfa-n3 (injection),
interferon alfa-n1, DL-8234, interferon, Suntory (gamma-1a), interferon gamma, thymosin alpha 1,
tasonermin, DIGIFAB (digoxin immune Fab), VIPERATAB (purified sheep-derived Vipera berus
common adder antivenom), ECHITAB (monospecific ovine Fab antivenom), CROFAB (Crotalidae
Polyvalent Immune Fab), nesiritide, abatacept, alefacept, REBIF (interferon beta-1a), eptotermin
alfa, teriparatide (osteoporosis), calcitonin injectable, bone disease), calcitonin (nasal, osteoporosis),
etanercept, hemoglobin glutamer 250 (bovine), drotrecogin alfa, collagenase, carperitide,
recombinant human epidermal growth factor (topical gel, wound healing), DWP-401 (Nepidermin),
darbepoetin alfa, epoetin omega, epoetin beta, epoetin alfa, desirudin, lepirudin, bivalirudin,
nonacog alpha, Mononine, eptacog alfa (activated), recombinant Factor VIII + VWF,
RECOMBINATE (Antihemophilic Factor), recombinant Factor VIII, Factor VIII (recombinant),
Alphanate, octocog alfa, Factor VIII, palifermin, Indikinase, tenecteplase, alteplase,
pamiteplase, reteplase, nateplase, monteplase, follitropin alfa, rFSH, hpFSH, micafungin,
pegfilgrastim, lenograstim, nartograstim, sermorelin, glucagon, exenatide, pramlintide,
imiglucerase, galsulfase, Leucotropin, molgramostim, triptorelin acetate, histrelin, histrelin
acetate, deslorelin, nafarelin, ATRIGEL (leuprolide sustained release depot), DUROS (leuprolide
implant), somatropin, Eutropin, KP-102 program, somatropin, somatropin, mecasermin (growth
failure), enfuvirtide, Org-33408, insulin glargine, insulin glulisine, insulin (inhaled), insulin lispro,
insulin detemir, RapidMist (insulin) (buccal), mecasermin rinfabate, anakinra, celmoleukin,
99mTc-apcitide injection, myelopid, Betaseron, glatiramer acetate, Gepon, oprelvekin, human
leukocyte-derived alpha interferons, Bilive, insulin (recombinant), recombinant human insulin, insulin
aspart, mecasermin, ROFERON-A (interferon alpha 2a), interferon-alpha 2, Alfaferone, interferon
alfacon-1, interferon alpha, AVONEX (interferonbeta-1a)′ recombinant human luteinizing
hormone, domase alfa, trafermin, ziconotide, taltirelin, dibotermin alfa, atosiban, becaplermin,
eptifibatide, ZEMAIRA (Alpha1 proteinase inhibitor), CTC-111, Shanvac-B, HPV vaccine
(quadrivalent), NOV-002, octreotide, lanreotide, ancestim, agalsidase beta, agalsidase alfa,
laronidase, prezatide copper acetate (topical gel), rasburicase, ranibizumab, ACTIMMUNE
(Interferon gamma-1b), PEG-Intron, Tricomin, recombinant house dust mite allergy desensitization
injection, recombinant human parathyroid hormone (PTH) 1-84 (sc, osteoporosis), epoetin delta,
transgenic antithrombin III, Granditropin, Vitrase, recombinant insulin, interferon-alpha (oral
lozenge), GEM-21S, vapreotide, idursulfase, omapatrilat, recombinant serum albumin,
certolizumab pegol, glucarpidase, human recombinant C1 esterase inhibitor (angioedema),
lanoteplase, recombinant human growth hormone, BIOJECTOR 2000 (enfuvirtide) (needle-free
injection), VGV-1, interferon (alpha), lucinactant, aviptadil (inhaled, pulmonary disease), icatibant,
ecallantide, omiganan, Aurograb, pexiganan acetate, ADI-PEG-20, LDI-200, degarelix,
cintredekinbesudotox, FavId, MDX-1379, ISAtx-247, liraglutide, teriparatide (osteoporosis),
tifacogin, AA-4500, T4N5 liposome lotion, catumaxomab, DWP-413, ART-123, Chrysalin,
desmoteplase, amediplase, corifollitropin alpha, TH-9507, teduglutide, Diamyd, DWP-412,
growth hormone (sustained release injection), recombinant G-CSF, insulin (inhaled, AIR), insulin
(inhaled, Technosphere), insulin (inhaled, AERx), RGN-303, DiaPep277, interferon beta (hepatitis C
viral infection (HCV)), interferon alfa-n3 (oral), belatacept, transdermal insulin patches, AMG-531,
MBP-8298, XERECEPT (corticorelin), opebacan, AIDSVAX, GV-1001, LymphoScan,
ranpimase, Lipoxysan, lusupultide, MP52 (beta-tricalciumphosphate carrier, bone regeneration),
melanoma vaccine, sipuleucel-T, CTP-37, INSEGIA (G17DT Immunogen), vitespen, human
thrombin (frozen, surgical bleeding), thrombin, TransMID, alfimeprase, Puricase, terlipressin, EUR-
1008M, recombinant FGF-1, BDM-E, rotigaptide, ETC-216, P-113, MBI-594AN, duramycin
(inhaled, cystic fibrosis), SCV-07, OPI-45, Endostatin, Angiostatin, ABT-510, Bowman Birk
Inhibitor Concentrate, XMP-629, 99mTc-Hynic-Annexin V, kahalalide F, CTCE-9908, teverelix
(extended release), ozarelix, romidepsin, BAY-50-4798, interleukin-4, PRX-321, Pepscan,
iboctadekin, rh lactoferrin, TRU-015, IL-21, ATN-161, cilengitide, ALBUFERON (albinterferon
alfa-2b), Biphasix, IRX-2, omega interferon, PCK-3145, CAP-232, pasireotide, huN901-DM1,
ovarian cancer immunotherapeutic vaccine, SB-249553, Oncovax-CL, OncoVax-P, BLP-25,
CerVax-16, nemifitide, rAAT (inhaled), rAAT (dermatological), CGRP (inhaled, asthma),
pegsunercept, thymosin beta-4, plitidepsin, GTP-200, ramoplanin, GRASPA, OBI-1, AC-100,
salmon calcitonin (oral, eligen), calcitonin (oral, osteoporosis), examorelin, capromorelin, Cardeva,
velafermin, 131I-TM-601, KK-220, TP-10, ularitide, depelestat, hematide, Chrysalin (topical),
rNAPc2, recombinant Factor VIII (PEGylated liposomal), bFGF, PEGylated recombinant
staphylokinase variant, V-10153, SonoLysis Prolyse, NeuroVax, CZEN-002, islet cell neogenesis
therapy, rGLP-1, BIM-51077, LY-548806, exenatide, AVE-0010, GA-GCB, avorelin, AOD-
9604, linaclotide acetate, CETi-1, HEMOSPAN (PEG-conjugated hemoglobin), VAL (injectable),
insulin, recombinant methionyl human leptin, pitrakinra subcutaneous injection, eczema), pitrakinra
(inhaled dry powder, asthma), MULTIKINE (Leukocyte Interleukin), RG-1068, MM-093, NBI-
6024, AT-001, PI-0824, Org-39141, Cpn10 (autoimmune iseases/inflammation), talactoferrin
(topical), rEV-131 (ophthalmic), rEV-131 (respiratory disease), oral recombinant human insulin
(diabetes), RPI-78M, CYT-99007 CTLA4-Ig, DTY-001, valategrast, interferon alfa-n3 (topical),
IRX-3, RDP-58, TAUFERON (interferon tau), bile salt stimulated lipase, Merispase, alkaline
phosphatase, EP-2104R, Melanotan-II, bremelanotide, ATL-104, recombinant human
microplasmin, AX-200, SEMAX, ACV-1, Xen-2174, CJC-1008, dynorphinA, SI-6603, LAB
GHRH, AER-002, BGC-728, malaria vaccine (virosomes, PeviPRO), ALTU-135, parvovirus B19
vaccine, influenza vaccine (recombinant neuraminidase), malaria/HBV vaccine, anthrax vaccine, Vacc-
5q, Vacc-4x, HIV vaccine (oral), HPV vaccine, Tat Toxoid, YSPSL, CHS-13340 , PTH(1-34)
liposomal cream (Novasome), Ostabolin-C, PTH analog (topical, psoriasis), MBRI-93.02, MTB72F
vaccine (tuberculosis), MVA-Ag85 A vaccine (tuberculosis), FAR-404, BA-210, recombinant plague
F1V vaccine, AG-702, OxSODro1, rBetV1, Der-p1/Der-p2/Der-p7 allergen-targeting vaccine (dust
mite allergy), PR1 peptide antigen (leukemia), mutant ras vaccine, HPV-16 E7 lipopeptide vaccine,
labyrinthin vaccine (adenocarcinoma), CML vaccine, WT1-peptide vaccine (cancer), IDD-5, CDX-
110, Pentrys, Norelin, CytoFab, P-9808, VT-111, icrocaptide, telbermin, rupintrivir,
reticulose, rGRF, P1A, alpha-galactosidase A, ACE-011, ALTU-140, CGX-1160, angiotensin
therapeutic vaccine, D-4F, ETC-642, APP-018, rhMBL, SCV-07 (oral, tuberculosis), DRF-7295,
ABT-828, ErbB2-specific immunotoxin (anticancer), DT388IL-3, TST-10088, PRO-1762,
Combotox, cholecystokinin-B/gastrin-receptor binding peptides, 111In-hEGF, AE-37, trastuzumab-
DM1, Antagonist G, IL-12 (recombinant), PM-02734, IMP-321, rhIGF-BP3, BLX-883, CUV-1647
(topical), L-19 based radioimmunotherapeutics (cancer), Re-188-P-2045, AMG-386, DC/I540/KLH
vaccine (cancer), VX-001, AVE-9633, AC-9301, NY-ESO-1 vaccine (peptides), NA17.A2 peptides,
melanoma vaccine (pulsed antigen therapeutic), prostate cancer vaccine, CBP-501, recombinant human
lactoferrin (dry eye), FX-06, AP-214, WAP-8294A2 (injectable), ACP-HIP, SUN-11031, peptide YY
[3-36] (obesity, intranasal), FGLL, atacicept, BR3-Fc, BN-003, BA-058, human parathyroid
hormone 1-34 (nasal, osteoporosis), F-18-CCR1, AT-1001 (celiac disease/diabetes), JPD-003, PTH(7-
34) liposomal cream (Novasome), duramycin, CAB-2 , CTCE-0214, erythropoietin, EPO-Fc, CNTO-
528, AMG-114 , JR-013, Factor XIII, aminocandin, PN-951, 716155, SUN-E7001, TH-0318,
BAY-73-7977 , teverelix (immediate release), EP-51216, hGH, OGP-I, sifuvirtide, TV-4710, ALG-
889, Org-41259, rhCC10, F-991, thymopentin (pulmonary diseases), r(m)CRP, hepatoselective
insulin, subalin, L19-IL-2 fusion protein, elafin, NMK-150, ALTU-139, EN-122004, rhTPO,
thrombopoietin receptor agonist, AL-108, AL-208, nerve growth factor antagonists (pain), SLV-317,
CGX-1007, INNO-105, oral teriparatide (eligen), GEM-OS1, AC-162352, PRX-302, LFn-p24
fusion vaccine (Therapore), EP-1043, hPTH(1-34), 768974, SYN-101, PGN-0052, aviscumine, BIM-
23190, enkastim, APC-8024, GI-5005, ACC-001, TTS-CD3, TNF, desmopressin, onercept, TP-
9201, AC165198, Activin receptor type IIA, Adenosine deaminase, Adipotide, Afostase alfa (alkaline
phosphatase), Alpha melanocyte stimulating hormone, Alpha-1 antitrypsin, Alpha-galactosidase,
Angiotensin, Anti-angiopoietin-1 inhibitor, Anti-angiopoietin-2 inhibitor, Apolipoprotein A1,
ARCALYST (filonacept), Arginine deiminase, Asparaginase, Atilmotin, AZD2820, Bradykinin
receptor antagonist, Calcitonin, Calcitonin gene-related peptide, Cenderitide, Cholecystokinin, Ciliary
nemotropic factor (CNTF), Ciligenitide, Coagulation factor IX, Coagulation factor VII, Coagulation
factor VIII, Coagulation factor X, Coagulation factor XIII, Collagenase, Complement C1 esterase
inhibitor (conestat alfa), Complement factor C3 inhibitor, Complement factor C5 inhibitor,
Corticotropin-releasing factor, C-peptide, C-type natriuretic peptide, Defensins, DiaPep277,
Diphenhydramine, Ecallantide, Endostatin, Eptifibatide, Fibrinogen, Fibroblast growth factor receptor
agonist, Follicle-stimulating hormone (FSH), Follistatin, FP-1039 (FGF trap), Fuzeon, Gastrin, Ghrelin,
Ghrelin antagonist, GIP-1, GIP-1/GLP-1 dual agonist, Glucagon, Glucagon-like peptide (GLP) 1,
Glucagon-like peptide (GLP) 2, Glucocerebrosidase (Cerezyme), Glutamate carboxypeptidase
(carboxypeptidase G2), Glutaminase, Granulocyte colony stimulating factor (GCSF), Growth hormone,
Growth hormone releasing hormone (GHRH), Hematide, Heparinase, Hirudin, Human chorionic
gonadotropin (hCG), Human deoxyribonuclease I, Humanin, Hyaluronidase, Icatibant, ELAPRASE
(Iduronate-2-sulfatase), INGAP (Exsulin), Insulin, Irisin, KAI-4169, REFLUDAN (Lepirudin),
Leukemia inhibiting factor, L-iduronidase, LRP5 inhibitor, LRP6 inhibitor, Luteinizing hormone (LH),
Macrophage inflammatory protein 2 (GroBeta-T CXC chemokine), Mannose binding lectin,
Melanocortin stimulating hormone, Methioninase (METase), Mirostipen, MUCI inhibitor, Myostatin
inhibitor, N-acetylgalactosamine 4-sulfatase (Naglazyme), CEREBROLYSIN (Nerve growth factor),
Neuropeptide Y2, Neurophilin, NU206, ONCONASE (Ranpimase), Ontak (IL-2-toxin), Opioid growth
factor, Oxyntomodulin, Oxytocin, Paliperidone, Pancreatic polypeptide, PanCyte, Parathyroid hormone
(PTH), Parathyroid hormone related protein (PTHrP), Peptide YY (3-36), Phenylalanine ammonia lyase
(PAL), Phenylalanine hydroxylase(PAH), Pituitary adenylate cyclase-activating polypeptide (PACAP),
Platelet-activating factor acetylhydrolase, POT-4 (APL-1), Pramlintide, P-Selectin, Relaxin,
PULMOZYME (rhDNase), RNase, Sanvar, Secretin, SN38, Somatostatin (Octreotide, Pasireotide,
Sandostatin etc.), Somavert (human growth hormone receptor antagonist), Stem cell growth factor,
Superoxide dismutase, TACI, Thrombin inhibitor (direct), Thrombomodulin, Thrombopoietin (TPO),
Thymosin alpha 1 (Thymalfasin), Thyroid stimulating hormone (TSH), Thyrotropin releasing hormone,
Tigapotide, Tissue plasminogen activator (tPA), TLN-232, Tripeptidyl peptidase 1, Tumour necrosis
factor receptor, Tyrosine kinase receptor (TrkA), UGP281, Urate oxidase, Uricase, Urocortin 2,
Urokinase plasminogen activator, Vascular endothelial growth factor (VEGF) inhibitor, Vasoactive
intestinal peptide, Vasopressin, von Willebrand Factor (vWF), PRIALT (Ziconotide), Zinc
protoporphyrin, Adrenal corticotrophin hormone (ACTH), CD25, Interleukin-1 receptor, Interleukin-21,
ABCF1, ACVR1, ACVR1B, ACVR2, ACVR2B, ACVRL1, ADORA2A, Aggrecan, AGR2, AICDA,
AIF1, AIG1, AKAP1, AKAP2, AMH, AMHR2, ANGPT1, ANGPT2, ANGPTL3, ANGPTL4, ANPEP,
APC, APOC1, APRIL, AR, AZGP1 (zinc-a-glycoprotein), A4 integrin, B7, B7.1, B7.2, BAD, BAFF,
BAG1, BAI1, BCL2, BCL6, BDNF, BLNK, BLR1 (MDR15), BlyS, BMP1, BMP2, BMP3B (GDF10),
BMP4, BMP6, BMP8, BMPR1A, BMPR1B, BMPR2, BPAG1 (plectin), BRCA1, C19orf10 (IL27w),
C3, C4A, C5, C5R1, CANT1, CASP1, CASP4, CAV1, CCBP2 (D6/JAB61), CCL1 (1-309), CCL11
(eotaxin), CCL13 (MCP-4), CCL15 (MIP-1d), CCL16 (HCC-4), CCL17 (TARC), CCL18 (PARC),
CCL19 (MIP-3b), CCL2 (MCP-1), MCAF, CCL20 (MIP-3a), CCL21 (MIP-2), SLC, exodus-2, CCL22
(MDC/STC-1), CCL23 (MPIF-1), CCL24 (MPIF-2/eotaxin-2), CCL25 (TECK), CCL26 (eotaxin-3),
CCL27 (CTACK/ILC), CCL28, CCL3 (MIP-1a), CCL4 (MIP-1b), CCL5 (RANTES), CCL7 (MCP-3),
CCL8 (mcp-2), CCNA1, CCNA2, CCND1, CCNE1, CCNE2, CCR1 (CKR1/HM145), CCR2 (mcp-
1RB/RA), CCR3 (CKR3/CMKBR3), CCR4, CCR5 (CMKBR5/ChemR13), CCR6 (CMKBR6/CKR-
L3/STRL22/DRY6), CCR7 (CKR7/EBI1), CCR8 (CMKBR8/TER1/CKR-L1), CCR9 (GPR-9-6),
CCRL1 (VSHK1), CCRL2 (L-CCR), CD164, CD19, CD1C, CD20, CD200, CD-22, CD24, CD28,
CD3, CD37, CD38, CD3E, CD3G, CD3Z, CD4, CD11a (LFA-1 integrin alphaL), CD40, CD40L,
CD44, CD45RB, CD52, CD69, CD72, CD74, CD79A, CD79B, CD8, CD80, CD81, CD83, CD86,
CD340, CDH1 (E-cadherin), CDH10, CDH12, CDH13, CDH18, CDH19, CDH20, CDH5, CDH7,
CDH8, CDH9, CDK2, CDK3, CDK4, CDK5, CDK6, CDK7, CDK9, CDKN1A (p21Wap1/Cip1),
CDKN1B (p27Kip1), CDKN1C, CDKN2A (pl6INK4a), CDKN2B, CDKN2C, CDKN3, CEBPB,
CER1, CHGA, CHGB, Chitinase, CHST10, CKLFSF2, CKLFSF3, CKLFSF4, CKLFSF5, CKLFSF6,
CKLFSF7, CKLFSF8; CLDN3; CLDN7 (claudin-7); CLN3; CLU (clusterin); cMET; CMKLR1;
CMKOR1 (RDC1); CNR1; COL18A1; COL1A1; COL4A3; COL6A1; CR2; CRP; CSF1 (M-CSF);
CSF2 (GM-CSF); CSF3 (GCSF); CTLA4; CTNNB1 (b-catenin); CTSB (cathepsin B); CX3CL1
(SCYD1); CX3CR1 (V28); CXCL1 (GRO1); CXCL10(IP-10); CXCL11 (I-TAC/IP-9); CXCL12
(SDF1); CXCL13; CXCL14; CXCL16; CXCL2 (GRO2); CXCL3 (GRO3); CXCL5 (ENA-78/LIX);
CXCL6 (GCP-2); CXCL9 (MIG); CXCR3 (GPR9/CKR-L2); CXCR4; CXCR6
(TYMSTR/STRL33/Bonzo); CYB5; CYC1; CYSLTR1; DAB2IP; DES; DKFZp451J0118; DNCL1;
DPP4; E2F1; ECGF1; EDG1; EFNA1; EFNA3; EFNB2; EGF; EGFR; ELAC2; elastase; ENG; ENO1;
ENO2; ENO3; EPHB4; EPO; ERBB-2 (Her2); EREG; ERK8; ESR1; ESR2; F3 (TF); FADD; FasL;
FASN; FCER1A; FCER2; FCGR3A; FGF; FGF1 (aFGF); FGF10; FGF11; FGF12; FGF12B; FGF13;
FGF14; FGF16; FGF17; FGF18; FGF19; FGF2 (bFGF); FGF20; FGF21; FGF22; FGF23; FGF3 (int-
2); FGF4 (HST); FGF5; FGF6 (HST-2); FGF7 (KGF); FGF8; FGF9; FGFR3; FIGF (VEGFD); FIL1
(EPSILON); FIL1 (ZETA); FLJ12584; FLJ25530; FLRT1 (fibronectin); FLT1; FOS; FOSL1 (FRA-1);
FY (DARC); GABRP (GABAa); GAGEB1; GAGEC1; GALNAC4S-6ST; GATA3; GDF5; GFI1;
GGT1; GM-CSF; GNAS1; GNRH1; GPR2 (CCR10); GPR31; GPR44; GPR81 (FKSG80); GRCC10
(C10); GRP; GSN (Gelsolin); GSTP1; HAVCR2; HDAC4; HDAC5; HDAC7A; HDAC9; HER2; HGF;
HIF1A; HIP1; histamine and histamine receptors; HLA-A; HLA-DRA; HM74; HMOX1;
HUMCYT2A; ICEBERG; ICOSL; ID2; IFN-a; IFNA1; IFNA2; IFNA4; IFNA5; IFNA6; IFNA7;
IFNB1; IFNgamma; IFNW1; IGBP1; IGF1; IGF1R; IGF2; IGFBP2; IGFBP3; IGFBP6; IL-1; IL10;
IL10RA; IL10RB; IL11; IL11RA; IL-12; IL12A; IL12B; IL12RB1; IL12RB2; IL13; IL13RA1;
IL13RA2; IL14; IL15; IL15RA; IL16; IL17; IL17B; IL17C; IL17R; IL18; IL18BP; IL18R1; IL18RAP;
IL19; IL1A; IL1B; IL1F10; IL1F5; IL1F6; IL1F7; IL1F8; IL1F9; IL1HY1; IL1R1; IL1R2; IL1RAP;
IL1RAPL1; IL1RAPL2; IL1RL1; IL1RL2; IL1RN; IL2; IL20; IL20RA; IL21R; IL22; IL22R;
IL22RA2; IL23; IL24; IL25; IL26; IL27; IL28A; IL28B; IL29; IL2RA; IL2RB; IL2RG; IL3; IL30;
IL3RA; IL4; IL4R; IL5; IL5RA; IL6; IL6R; IL6ST (glycoprotein 130); IL7; IL7R; IL8; IL8RA;
IL8RB; IL8RB; IL9; IL9R; ILK; INHA; INHBA; INSL3; INSL4; IRAKI; IRAK2; ITGA1; ITGA2;
ITGA3; ITGA6 (a6 integrin); ITGAV; ITGB3; ITGB4 (b 4 integrin); JAG1; JAK1; JAK3; JUN; K6HF;
KAI1; KDR; KITLG; KLF5 (GC Box BP); KLF6; KLK10; KLK12; KLK13; KLK14; KLK15; KLK3;
KLK4; KLK5; KLK6; KLK9; KRT1; KRT19 (Keratin 19); KRT2A; KRTHB6 (hair-specific type II
keratin); LAMA5; LEP (leptin); LFA3; LIGHT; Lingo-p75; Lingo-Troy; LPS; LTA (TNF-b); LTB;
LTB4R (GPR16); LTB4R2; LTBR; MACMARCKS; MAG or Omgp; MAP2K7 (c-Jun); MDK; MIB1;
midkine; MIF; MIP-2; MKI67 (Ki-67); MMP2; MMP9; MS4A1; MSMB; MT3 (metallothionectin-III);
MTSS1; MUC1 (mucin); MYC; MYD88; NCK2; neurocan; NFKB1; NFKB2; NGFB (NGF); NGFR;
NgR-Lingo; NgR-Nogo66 (Nogo); NgR-p75; NgR-Troy; NME1 (NM23A); NOX5; NPPB; NR0B1;
NR0B2; NR1D1; NR1D2; NR1H2; NR1H3; NR1H4; NRII2; NRII3; NR2C1; NR2C2; NR2E1;
NR2E3; NR2F1; NR2F2; NR2F6; NR3C1; NR3C2; NR4A1; NR4A2; NR4A3; NR5A1; NR5A2;
NR6A1; NRP1; NRP2; NT5E; NTN4; ODZ1; OPRD1; P2RX7; PAP; PART1; PATE; PAWR; PCA3;
PCNA; PDGFA; PDGFB; PECAM1; PF4 (CXCL4); PGF; PGR; phosphacan; PIAS2; PIK3CG; PLAU
(uPA); PLG; PLXDC1; PPBP (CXCL7); PPID; PR1; PRKCQ; PRKD1; PRL; PROC; PROK2; PSAP;
PSCA; PTAFR; PTEN; PTGS2 (COX-2); PTN; RAC2 (p21Rac2); RANKL; RARB; RGS1; RGS13;
RGS3; RNF110 (ZNF144); ROBO2; RSV; SI00A2; SCGB1D2 (lipophilin B); SCGB2A1
(mammaglobin 2); SCGB2A2 (mammaglobin 1); SCYE1 (endothelial Monocyte-activating cytokine);
SDF2; SERPINA1; SERPINA3; SERPINB5 (maspin); SERPINE1 (PAI-1); SERPINF1; SHBG; SLA2;
SLC2A2; SLC33A1; SLC43A1; SLIT2; SPP1; SPRR1B (Spr1); ST6GAL1; STAB1; STAT6; STEAP;
STEAP2; TB4R2; TBX21; TCP10; TDGF1; TEK; TGFA; TGFB1; TGFB111; TGFB2; TGFB3;
TGFBI; TGFBR1; TGFBR2; TGFBR3; TH1L; THBS1 (thrombospondin-1); THBS2; THBS4; THPO;
TIE (Tie-1); TIMP3; tissue factor; TLR10; ILR2; TLR3; TLR4; TLR5; ILR6; TLR7; TLR8; TLR9;
TNF; TNF-a; TNFAIP2 (B94); TNFAIP3; TNFRSF11A; TNFRSF1A; TNFRSF1B; TNFRSF21;
TNFRSF5; TNFRSF6 (Fas); TNFRSF7; TNFRSF8; TNFRSF9; TNFSF10 (TRAIL); TNFSF11
(TRANCE); TNFSF12 (APO3L); TNFSF13 (April); TNFSF13B; TNFSF14 (HVEM-L); TNFSF15
(VEGI); TNFSF18; TNFSF4 (OX40 ligand); TNFSF5 (CD40 ligand); TNFSF6 (FasL); TNFSF7 (CD27
ligand); TNFSF8 (CD30 ligand); TNFSF9 (4-1BB ligand); TOLLIP; Toll-like receptors (TLR1, 2, 3, 4,
5, 6, 7, 8, 9, 10, 11, 12 to TLR-13); TOP2A (topoisomerase Iia); TP53; TPM1; TPM2; TRADD;
TRAF1; TRAF2; TRAF3; TRAF4; TRAF5; TRAF6; TREM1; TREM2; TRPC6; TSLP; TWEAK;
VAP1; VEGF; VEGFB; VEGFC; versican; VHL C5; VLA-1; VLA-4; XCL1 (lymphotactin); XCL2
(SCM-1b); XCR1 (GPR5/CCXCR1); YY1; ZFPM2.

[0282] 3. Exemplary Biologically Active Proteins as Payloads

[0283] Proteinacious compounds that are specifically contemplated as payloads in the subject compositions are the following peptides and proteins:

[0284] “C-type Natriuretic peptide” or “CNP” means the human protein (UniProt No. P23582) encoded by the NPPC gene that is cleaved to the 22 amino acid peptide C-type natriuretic peptide (CNP), having the sequence GLSKGCFGLKLDRIGSMSGLGC (SEQ ID NO: 539), as well as species and synthetic variations thereof, having at least a portion of the biological activity of the native peptide. CNP is a selective agonist for the B-type natriuretic receptor (NPRB) and is reported to be a potent stimulator of endochondral bone growth. CNP binds to its receptor, initiates intracellular signals & ultimately inhibit the overactive FGFR3 pathway. Use of CNP is indicated for achondroplasia, a common form of skeletal dysplasia or short-limbed dwarfism, and human disorders caused by FGFR3 mutations, including syndromes affecting skeletal development; e.g., hypochondroplasia [HCH], ACH, thanatophoric dysplasia [TD]), skin (epidermal nevi, seborrhaeic keratosis, acanthosis nigricans), and cancer (multiple myeloma [MM], prostate and bladder carcinoma, seminoma) (Foldynova-Trantirkova S. Hum Mutat. (2012) 33:29). The half-life of CNP-22 is reported to be 2.6 min, being rapidly metabolized by neutral endopeptidase & cleared by a clearance receptor (Prickett T., 2004, Clinical Science, 106:535), thereby limiting its utility.

[0285] “Luteinizing hormone-releasing hormone” or “LHRH” means the human protein (UniProt No. P01148) encoded by the GNRH1 gene that is processed in the preoptic anterior hypothalamus from a 92-amino acid preprohormone into the linear decapeptide end-product having the sequence pyroGlu-His-Trp-Ser-Tyr-Gly-Leu-Arg-Pro-Gly-NH2 (SEQ ID NO: 540), as well as species and synthetic variations thereof, having at least a portion of the biological activity of the native peptide. LHRH plays a pivotal role in the regulation of the pituitary/gonadal axis, and thus reproduction. LHRH exerts its effects through binding to high-affinity receptors on the pituitary gonadotroph cells and subsequent release of FSH and LH. LHRH is found in organs outside of the hypothalamus and pituitary, and because a high percentage of certain cancer tissues have LHRH binding sites and because sex steroids have been implicated in the development of breast and prostate cancers, hormonal therapy with LHRH agonists are approved or are considered for the treatment of sex-steroid-dependent conditions such as estrogen-dependent breast cancer, ovarian cancer, endometrial cancer, bladder cancer and androgen-dependent prostate carcinoma. Because the half-life is reported to be less than 4 minutes. (Redding T W, et al. The Half-life, Metabolism and Excretion of Tritiated Luteinizing Hormone-Releasing Hormone (LH-RH) in Man. J Clin Endocrinol. Metab. (1973) 37:626-631). its utility as a therapeutic is limited.

[0286] “Cilengitide” means the synthetic cyclic RGD pentapeptide having the sequence Arg-Gly-Asp-Dphe-NmeVal (SEQ ID NO: 541) or the chemical name 2-[(2S,5R,8S,11S)-5-benzyl-11-{3-[(diaminomethylidene)amino]propyl}-7-methyl-3,6,9,12,15-pentaoxo-8-(propan-2-yl)-1,4,7,10,13-pentaazacyclopentadccan-2-yl]acetic acid (CAS No. 1889X8-51-6). Cilengitide is selective for αv integrins, which are important in angiogenesis (forming new blood vessels). The binding of such ligands activates the integrins to regulate tumor cell invasion. migration, proliferation, survival & angiogenesis. Hence, the use of cilengitide is under investigation for the treatment of glioblastoma by inhibiting angiogenesis (Burke P, et al. Cilengitide targeting of αvβ3 integrin receptor synergizes with radioimmunotherapy to increase efficacy and apoptosis in breast cancer xenografts”. Cancer Res (2002) 62(15): 4263-4272). Because cilengitide has a short half-life of 3-5 h, and poor solubility limiting the maximum drug concentration to 15 mg/mL (O'Donnell P H. A phase I study of continuous infusion cilengitide in patients with solid tumors. Invest New Drugs (2012) 30:604). its utility as a therapeutic is limited.

[0287] “Growth hormone releasing hormone” or “GHRH” (also known as growth-hormone-releasing factor, GRF, GHRF, somatoliberin or somatocrinin” means the 44-amino acid peptide hormone produced in the arcuate nucleus of the hypothalamus having the sequence YADAIFTNSYRKVLGQLSARKLLQDIMSRQQGESNQERGARARL (SEQ ID NO: 542). as well as species and synthetic variations thereof, having at least a portion of the biological activity of the native peptide, including the biologically active 1-29 amino acid truncation peptide YADAIFTNSYRKVLGQLSARKLLQDIMSR (SEQ ID NO: 543). GHRH is released from neurosecretory nerve terminals and is carried by the hypothalamo-hypophyseal portal system to the anterior pituitary gland where it acts on GHRH receptor to stimulate pulsatile growth hormone release. The GHRH analog tesamorelin is a drug approved for the treatment of lipodystrophy in HIV patients under highly active antiretroviral therapy, and is also considered for use in cachexia. abdominal obesity in growth-hormone deficient patients. muscle wasting related to certain chronic diseases, mild cognitive impairment, and growth hormone replacement in growth hormone deficient patients. Because the half-life is reported to be less than 15 minutes, (Chapman I M. J Endocrinol (1991) 128:369-374), its utility as a therapeutic is limited.

[0288] “Peptide YY” and “PYY” mean human peptide YY polypeptide (UniProt No. P10082), synthetic versions and species and non-natural sequence variants having at least a portion of the biological activity of mature PYY. As used herein, “PYY” includes both major forms of the human full length, 36 amino acid peptide, PYY₁₋₃₆ and the predominant circulating form PYY₃₋₃₆ (“PYY3-36”) which have the PP fold structural motif. PYY3-36 has the sequence IKPEAPGEDASPEELNRYYASLRHYLNLVTRQRY-NH2 (SEQ ID NO: 544). PYY is produced by specialized endocrine cells (L-cells) in the gut after a person eats and inhibits gastric motility and increases water and electrolyte absorption in the colon. PYY may also suppress pancreatic secretion. The naturally occurring PYY3-36 is a nonselective Y₁, Y₂, & Y₅ agonist. PPY-containing fusion proteins of the invention may find particular use in the treatment of diabetes for glucose regulation, insulin-resistance disorders, and obesity. Analogs of PYY have been prepared, as described in U.S. Pat. Nos. 5,604,203, 5,574,010 and 7,166,575. Because the half-life is reported to be less than 1 h. (Addison M L. A role for metalloendopeptidases in the breakdown of the gut hormone. PYY 3-36. Endocrinology (2011) 152(12):4630-4640) and is typically administered by the intranasal route three times daily, its utility as a therapeutic is limited.

[0289] “Leptin” means the naturally occurring leptin (UnitProt No. P41159) encoded by the Ob(Lep) gene, synthetic versions and species and non-natural sequence variants having at least a portion of the biological activity of the mature leptin. Leptin has the sequence VPIQKVQDDTKTLIKTIVTRINDISHTQSVSSKQKVTGLDFIPGLHPILTLSKMDQTLAVY QQILTSMPSRNVIQISNDLENLRDLLHVLAFSKSCHLPWASGLETLDSLGGVLEASGYST EVVALSRLQGSLQDMLWQLDLSPGC (SEQ ID NO: 545), and has a disulfide bridge between residues 97 and 147. Leptin plays a key role in regulating energy intake and energy expenditure, including appetite, metabolism, and body weight. Leptin-containing polypeptides of the invention may find particular use in the treatment of diabetes for glucose regulation, insulin-resistance disorders, obesity, congenital/acquired lipodystrophy, HAART-induced lipodystrophy, hypothalamic amenorrhea. Leptin has been cloned, as described in U.S. Pat. No. 7,112,659, and leptin analogs and fragments in U.S. Pat. Nos. 5,521,283, 5,532,336, PCT/US96/22308 and PCT/US96/01471. Because the commercially available form, metreleptin has a half-life reported to be 8-30 min (Klein S., et al. Adipose tissue leptin production and plasma leptin kinetics in humans. Diabetes (1996) 45:984-987) and the majority of current leptin therapies require 1×-2×/day dosing, its utility as a therapeutic is limited.

[0290] “Pramlintide” means the synthetic amylin mimetic having the sequence KCNTATCATNRLANFLVHSSNNFGPILPPTNVGSNTY-NH2 (SEQ ID NO: 546), and sequence variants having at least a portion of the biological activity of pramlintide or native amylin. The pramlintide has a sequence wherein amino acids from the rat amylin sequence are substituted for amino acids in the human amylin sequence. Amylin is a 37aa peptide secreted by pancreatic b-cells that is co-released with insulin in pulsatile fashion, typically in a molar ratio of 100 insulin to 1 amylin. Amylin functions to inhibit gastric emptying, glucagon secretion, promote satiety & meal termination (Kong M F, et al. Infusion of pramlintide, a human amylin analogue, delays gastric emptying in men with IDDM. Diabetologia. (1997) 40:82-88). Pramlintide is used as an adjunct to insulin therapy in T1D and T2D and shows improvement in glycemic control and reduction in insulin requirements, and also demonstrate modest reduction in body weight (Neary M T, Batterham R L. Gut hormones: Implications for the treatment of obesity. Pharmacology & Therapeutics (2009)124:44-56). Because pramlintide has a half-life reported to be 20 min (McQueen, J. Pramlintide acetate. Am. J. Health-System Pharmacy (2005) 22:2363-2372) and requires 2×-3×/day dosing, its utility as a therapeutic is limited.

[0291] “Oxytocin” means the mammalian hormone peptide (UniProt No. P01178) having the sequence CYIQNCPLG-NH2 (SEQ ID NO: 547) and a disulfide bridge between residues 1 and 6, and synthetic versions, such as pitocin. Oxytocin acts primarily as a neuromodulator in the brain, having a structure very similar to that of vasopressin, which are the only known hormones released by the human posterior pituitary gland to act at a distance. Oxytocin has uterine-contracting properties mediated by specific, high-affinity oxytocin receptors expressed in the mammary gland and the uterus; hence its role in parturition and lactation. Oxytocin-containing polypeptides of the invention may find particular use in the treatment of autism. fragile X syndrome, chronic daily headache, and male infertility.

[0292] “Relaxin” means the protein hormone that is a heterodimer of two peptide chains of 24 & 29 amino acids linked by disulfide bridges created from the 185 amino acid precursor protein (UniProt No. P04090); the B chain having the sequence DSWMEEVIKLCGRELVRAQIAICGMSTWS (SEQ ID NO: 548) and the A chain having the sequence QLYSALANKCCHVGCTKRSLARFC (SEQ ID NO: 549). with the disulfide bridges between B10-A10 and B23-A24, and includes synthetic and recombinant versions. Relaxin is produced by the corpus luteum during the menstrual cycle and pregnancy in women and by the prostate in men. Relaxin orchestrates many of the maternal physiological responses to pregnancy. acts as a systemic and renal vasodilator, is a cardioprotective & antifibrotic agent. Relaxin binds to relaxin receptor (GPCR), increases cAMP & activates PKC, PI3K & endothelin type B receptor resulting in increased nitric oxide production, and also activates MAPK. which may play a role in relaxin induced VEGF expression. Relaxin-containing polypeptides of the invention may find particular use in the treatment of acute decompensated heart failure (ADHF). Because the reported half-life of relaxin in humans is less than 10 min (Dschietzig T, et al. Intravenous recombinant human relaxin in compensated heart failure: a safety, tolerability, and pharmacodynamic trial. J Card Fail. 2009; 15:182-190), the utility of the unmodified protein as a therapeutic is limited.

[0293] “Cenderitide” and “CD-NP” means a human C-type natriuretic peptide-(32-53)-peptide (CNP-22) with eastern green mamba (Dendroaspis angusticeps) natriuretic peptide-(24-38)-peptide having the sequence GLSKGCFGLKLDRIGSMSGLGCPSLRDPRPNAPSTSA (SEQ ID NO: 550), with disulfide bridges between residues 6 and 22. The chimeric peptide has vasoprotective and RAAS suppressing actions via activation of the receptors guanylyl cyclase (GC)-A and GC-B, and may potentiate renal enhancement and cardiac unloading while having minimal hypotensive effects. Accordingly, it may have use in treatment of cardiorenal disease such as acute decompensated heart failure (ADHF) and acute myocardial infarction (AMI), particularly during the “post-acute” treatment period.

[0294] “Peginesatide” or “hematide” is a peptide composed of two synthetic 21 amino-acid peptides having the sequence GlyGlyLeuTyrAlaCysHisMetGlyProIleThrlNalValCysGlnProLeuArgSarLys (SEQ ID NO: 551) that are linked at lysine with a branched polyethylene glycol. Peginesatide is a novel analog of erythropoietin that has erythropoietic properties and is being developed for medical use as a treatment for anemia due to chronic kidney disease (CKD) in patients not on dialysis.

[0295] “Oxyntomodulin” or “OXM” means human oxyntomodulin, synthetic versions and sequence variants thereof having at least a portion of the biological activity of mature oxyntomodulin. Oxyntomodulin is a 37 amino acid peptide having the sequence HSQGTFTSDYSKYLDSRRAQDFVQWLMNTKRNRNNIA (SEQ ID NO: 552), is produced postprandially from intestinal L-cells in the colon and contains the 29 amino acid sequence of glucagon followed by an 8 amino acid carboxyterminal extension. Oxyntomodulin is an agonist at both the glucagon receptor and the GLP-1R, with its anorectic effect probably mediated via the latter receptor. OXM has been found to suppress appetite. OXM-containing polypeptides of the invention may find particular use in the treatment of diabetes for glucose regulation, insulin-resistance disorders, obesity, and can be used as a weight loss treatment. As native oxyntomodulin has been reported to have a half-life of ˜12 min in human plasma (measured with a cross-reacting glucagon assay; Schjoldager BT. Oxyntomodulin: a potential hormone from the distal gut. Pharmacokinetics and effects on gastric acid and insulin secretion in man. Eur J Clin Invest. (1988) 18(5):499-503.), the utility of the unmodified protein as a therapeutic is limited.

[0296] “POT4” or “APL-1” means the synthetic cyclic peptide having the sequence H-Ile-[Cys-Val-Val-Gln-Asp-Trp-Gly-His-His-Arg-Cys]-Thr-NH2 (SEQ ID NO: 553). POT4 is a more potent C3 complement inhibitor than compstatin, which inhibits the cleavage of native C3 to its active fragments C3a and C3b, and has extended circulating in vivo half-life of 8 hours. It is considered for use to prevent inflammation, damage and upregulation of angiogenic factors like VEGF in diseases like age-related macular degeneration (AMD), paroxysmal nocturnal hemoglobinuria (PNH), asthma and COPD.

[0297] “Interferon-lambda”, “IFN-λ”, interleukin-29” and “IL-29” means the human interleukin (UniProt No. Q81U54 (20-200)) encoded by the IL29 gene having the sequence GPVPTSKPTITGKGCHIGRFKSLSPQELASFKKARDALEESLKLKNWSCSSPVFPGNWDL RLLQVRERPVALEAELALTLKVLEAAAGPALEDVLDQPLHTLHHILSQLQACIQPQPTAG PRPRGRLHHWLHRLQEAPKKESAGCLEASVTFNLFRLLTRDLKYVADGNLCLRTSTHPE ST (SEQ ID NO: 554), recombinant and synthetic versions and sequence variants thereof having at least a portion of the biological activity of mature IL-29. A type III interferon, IL-29 signals through a heterodimer receptor complex (IL-10R2 & IL-28Ra receptor chains) distinct from type 1 IFN (IFNAR1/IFNAR2 receptor complex), and plays an important role in anti-viral immunity. Notably, the IL-29 receptor is highly expressed on hepatocytes, the primary site of HCV infection, but is not significantly expressed on immune or bone marrow cells. Pegylated versions have an estimated half-life of 50-70 h

[0298] “Interferon-beta” or “IFN-β” means the human protein encoded by the IFNB1 gene having the sequence MSYNLLGFLQRSSNFQCQKLLWQLNGRLEYCLKDRMNFDIPEEIKQLQQFQKEDAALTI YEMLQNIFAIFRQDSSSTGWNETIVENLLANVYHQINHLKTVLEEKLEKEDFTRGKLMSS LHLKRYYGRILHYLKAKEYSHCAWTIVRVEILRNFYFINRLTGYLRN (SEQ ID NO: 555), and recombinant and synthetic versions and sequence variants thereof having at least a portion of the biological activity of mature IFN-β. IFN-β is produced by various cell types including fibroblasts & macrophages, and mediates antiviral, antiproliferative & immunomodulatory activities in response to viral infection & other biological inducers. The binding of IFN-β to specific receptors on the surface of human cells initiates a cascade of intracellular events that leads to the expression of numerous interferon-induced gene products such as 2′,5′-oligoadenylate synthetase. β2-microglobulin, and neopterin. These gene products are routinely used as biomarkers in clinical setting. IFN-β is used in treatment of various forms of multiple sclerosis (MS), including elapse remitting MS, secondary progressive MS, primary progressive MS, juvenile onset MS, and clinically isolated syndromes suggestive of MS. Commercially-available forms of IFN-β have reported half-lives of 4 to 67 h and require frequent dosing, such that their utility as a therapeutic is limited.

[0299] “C-peptide” means the human pancreatic protein having the sequence EAEDLQVGQVELGGGPGAGSLQPLALEGSLQ (SEQ ID NO: 556), and recombinant and synthetic versions and sequence variants thereof having at least a portion of the biological activity of native C-peptide. C-peptide is the middle segment of proinsulin that is between the N-terminal B-chain and the C-terminal A-chain, and is cleaved from preproinsulin as mature insulin is formed and secreted. Circulating C-peptide binds to a receptor that is likely G-protein-coupled, and the signal activates Ca2+-dependent intracellular signaling pathways such as MAPK, PLCγ, and PKC, leading to upregulation of a range of transcription factors as well as eNOS and Na+K+ATPase activities. C-peptide is considered for use in diabetic complications and diabetic nephropathy. Since the reported half-life is about 30 minutes (Matthews D R The half-life of endogenous insulin and C-peptide in man assessed by somatostatin suppression. Clin Endocrinol (Oxf). (1985) 23(1):71-79), the utility of the unmodified protein as a therapeutic is limited.

[0300] “Ghrelin” means the human hormone having the sequence GSSFLSPEHQRVQQRKESKKPPAKLQPR (SEQ ID NO: 557), truncated versions, recombinant and synthetic versions and sequence variants thereof having at least a portion of the biological activity of native ghrelin, including the native, processed 27 or 28 amino acid sequence and homologous sequences. Ghrelin induces satiation, or species and non-natural sequence variants having at least a portion of the biological activity of mature ghrelin, including the native, processed 27 or 28 amino acid sequence and homologous sequences. Ghrelin is produced mainly by P/D1 cells lining the fundus of the human stomach and epsilon cells of the pancreas that stimulates hunger, and is considered the counterpart hormone to leptin. Ghrelin levels increase before meals and decrease after meals, and can result in increased food intake and increase fat mass by an action exerted at the level of the hypothalamus. Ghrelin also stimulates the release of growth hormone. Ghrelin is acylated at a serine residue by n-octanoic acid; this acylation is essential for binding to the GHS1a receptor and for the agonist activity and the GH-releasing capacity of ghrelin. Ghrelin-containing polypeptides of the invention may find particular use as agonists; e.g., to selectively stimulate motility of the GI tract in gastrointestinal motility disorder, to accelerate gastric emptying, or to stimulate the release of growth hormone. The invention also contemplates unacylated forms and sequence variants of ghrelin, which act as antagonists. Ghrelin analogs with sequence substitutions or truncated variants, such as described in U.S. Pat. No. 7,385,026, may find particular use as fusion partners to XTEN for use as antagonists for improved glucose homeostasis, treatment of insulin resistance and treatment of obesity, cancen cachexia, post-operative ileus, bowel disorders, and gastrointestinal disorders. The isolation and characterization of ghrelin has been reported (Kojima M, et al., Ghrelin is a growth-hormone-releasing acylated peptide from stomach. Nature. 1999; 402(6762):656-660) and synthetic analogs have been prepared by peptide synthesis, as described in U.S. Pat. No. 6,967,237. As ghrelin has a reported terminal half-life of 10-30 min (Akamizu T, et al. Pharmacokinctics, safety, and endocrine and appetite effects of ghrelin administration in young healthy subjects. Eur J. Endocrinology (2004)150(4):447-455), the utility of the unmodified protein as a therapeutic is limited, and analogs with. at position 3, the native serine amino acid with an octyl side group instead of the native octanoyl side group may confer added resistant to proteases.

[0301] “Follistatin,” also known as “activin-binding protein” or “FSH-suppressing protein (FSP),” means the protein that, in humans, is encoded by the FST gene. As used herein, “follistatin” includes homologs, species variants, sequence variants and fragments thereof. The mature protein form in humans has 315 amino acids, is referred to as FS-315 and has been cloned (U.S. Pat. Nos. 5,041,538 and 5,182,375). Follistatin contains two potential N-glycosylation sites, Asn95 and Asn259, however it has been demonstrated that mutation at these sites followed by testing of the recombinant product for their ability to inhibit FSH secretion and to bind activin resulted in each mutant having a similar property as the non-mutated recombinant hFS-315, suggesting that glycosylation of the follistatin molecule has no effect in these functions (Inouye, S., et al. Site-specific mutagenesis of human follistatin. BBRC (1991) 179(1):352-358). Porcine follistatin is disclosed in Ueno et al., PNAS:USA 84:8282-8286 (1987) and bovine follistatin is disclosed in Robertson et al., Biochem. Biophys. Res. Commun. 149:744-749 (1987). As bone morphogenetic proteins and growth/differentiation factors such as activin and myostatin have the ability to induce the growth, formation, differentiation and maintenance of various tissues, including bone, cartilage, tendon/ligament, muscle, neural, and various organs, their neutralization by follistatin and follistatin agonists have therapeutic value (U.S. Pat. Nos. 5,545,616, 5,041,538, and AU9675056). As follistatin administered to a subject is rapidly eliminated from the circulation, with a terminal half-life of just over 2 hours in rats (Kogure K, et al. Intravenous administration of follistatin: delivery to the liver and effect on liver regeneration after partial hepatectomy. Hepatology. (1996) 24(2):361-366), the utility of the unmodified protein as a therapeutic is limited.

[0302] “Vasoactive intestinal peptide” and “VIP” means the 28 amino acid peptide hormone (UniProt No. P01282 (125-152)) encoded by the VIP gene residues having the sequence HSDAVFTDNYTRLRKQMAVKKYLNSILN-NH2 (SEQ ID NO: 558) and recombinant and synthetic versions and sequence variants thereof having at least a portion of the biological activity of native VIP. The VIP peptide is produced in many tissues, including the gut, pancreas and suprachiasmatic nuclei of the hypothalamus in the brain. VIP stimulates contractility in the heart, causes vasodilation, increases glycogenolysis, lowers arterial blood pressure and relaxes the smooth muscle of trachea, stomach and gall bladder. Changes in concentration are associated with myocardial fibrosis, heart failure, cardiomyopathy and pulmonary hypertension, and its deficiency in the respiratory system is considered to be a pathogenetic factor in pulmonary disease (Said S I. 2007, Circulation, 115: 1260: Said S1, 2008, Ann N Y Acad Sci, 1144:148; Petkov V et. al., 2003, J Clin Invest, 111:1339). VIP is considered for use in treating resistant hypertension. primary pulmonary arterial hypertension (PAH), asthma, COPD, diabetes, erectile dysfunction, and female sexual dysfunction. As its half-life is reported to be approximately 1 minute (Domschke S, et al. Vasoactive intestinal peptide in man: pharmacokinetics, metabolic and circulatory effects. Gut (1978) 19:1049-1053), the utility of the unmodified protein as a therapeutic is limited.

[0303] “Fuzeon” means the 36 amino acid peptide derived from the gp41 of HIV, a viral protein involved in fusion of HIV to CD4+ T cells, having the sequence YTSLIHSLIEESQNQQEKNEQELLELDKWASLWNWF (SEQ ID NO: 559), and recombinant and synthetic versions and sequence variants thereof having at least a portion of the binding activity of native gp4l. Fuzeon and multimers thereof or conjugates with related peptides are used or are being considered for use in treating resistant forms of HIV infection As fuzeon has a half-life of 3.8 h in patients. requiring frequent injection administrations, its utility is limited.

[0304] “KAI-4169” means the peptide agonist of the human cell surface calcium-sensing receptor (CaSR) under development by KAI Pharma for the treatment of secondary hyperparathyroidism (SHPT) in kidney disease patients and bone disorder (CKD-MBD) patients.

[0305] “Pasireotide” means the a somatostatin analog having the chemical name [(3S,6S,9S,12R,15S,18S,20R)-9-(4-aminobutyl)-3-benzyl-12-(1H-indol-3-yhlmethy)-2,5,8,11,14,17-hexaoxo-15-phenyl-6-[(4-phenylmethoxyphenyl)methyl]-1,4,7,10,13,16-hexazabicyclo[16.3.0]henicosan-20-yl] N-(2-aminoethyl)carbamate used for the treatment of Cushing's disease. Pasireotide is a multi-receptor somatostatin analogue with high binding affinity for somatostatin-R-subtypes R1, 2, 3 & 5 that suppresses growth hormone, IGF-1 and adrenocorticotropic hormone secretion. In addition to treatment of Cushing's Disease. it is also considered for use in acromegaly, neuroendocrine disease, liver disease, symptomatic polycystic liver disease, neuroendocrine tumor, lympangioleiomyomatosis, congenital hyperinsulinism, recurrent or progressive meningioma, and other endocrine disorders. As a commercially-available form has a reported half-life of 12 to 17 h (Petersenn, S. et al. Tolerability and Dose Proportional Pharmacokinetics of Pasireotide Administered as a Single Dose or Two Divided Doses in Healthy Male Volunteers: A Single-Center, Open-Label, Ascending-Dose Study. Clinical Therapeutics (2012) 34:677-688). its utility is limited.

[0306] “Irisin” means the cleavage product of the protein encoded by the FNDC5 gene having the sequence DSPSAPVNVTVRHLKANSAVVSWDVLEDEVVIGFAISQQKKDVRMLRFIQEVNTTTRSC ALWDLEEDTEYIVHVQAISIQGQSPASEPVLFKTPREAEKMASKNKDEVTMKE (SEQ ID NO: 560), and recombinant and synthetic versions and sequence variants thereof having at least a portion of the biological activity of native irisin. Irisin mediates beneficial effects of muscular exercise, and induces browning of white adipose tissue by up-regulating UCP1 expression through activation of the nuclear receptor PPARA. Mildly increased irisin levels have been shown to result in increased energy expenditure, reduced body weight and improved diet-induced insulin resistance (Bostrom P, 2012, Nature. 481:463). Irisin is considered for use in treating obesity, diabetes, and metabolic disorders.

[0307] “TXA12T′ and “PanCyte” are analogs of angiotensin (1-7), with TXA127 having the sequence NRVYIHP (SEQ ID NO: 561) and PanCyte is an cyclic analog linking the 4th and 7th residues with dAla and Ala, respectively, with the result that it is more resistant to degradation and has a longer half-life. The analogs bind to MAS receptor and stimulate early hematopoietic precursor cells in bone marrow, and also have vasodilation, anti-trophic, antifibrotic, natriuresis, anti-inflammatory, anti-thrombotic effects. The compounds are considered for use in acceleration of platelet recovery following stem cell transplant for patients with hematological cancers such as acute myelogenous leukemia (AML), myelodysplastic syndrome (MDS), acute lymphocytic leukemia (ALL), chronic myelogenous leukemia (CML). chronic lymphocytic leukemia (CLL), Hodgkin's lymphoma (HL), or non-Hodgkin's lymphoma (NHL), and multiple myeloma, and use in treating pulmonary fibrosis, acute lung injury, pulmonary arterial hypertension, and fibrosis of the kidney and liver.

[0308] “Interleukin-7” and “IL-7” means the human interleukin (UniProt No. P13232 (26-177)) encoded by the 11.7 gene having the sequence DCDIEGKDGKQYESVLMVSIDQLLDSMKEIGSNCLNNEFNFFKRHICDANKEGMFLFRA ARKLRQFLKMNSTGDFDLHLLKVSEGTTILLNCTGQVKGRKPAALGEAQPTKSLEENKS LKEQKKLNDLCFLKRLLQEIKTCWNKILMGTKEH (SEQ ID NO: 562), and recombinant and synthetic versions and sequence variants thereof having at least a portion of the biological activity of native IL-7. IL-7 IL-7 stimulates the differentiation of multipotent (pluripotent) hematopoietic stein cells into lymphoid progenitor cells. including expansion of CD4/CD8 T cells. IL-7 limits the production of suppressor regulatory T cells and T cell anergy through TGF-B antagonism, and supports production of central memory T cells IL-7 is considered for use in treating lymphopenia in HIV. oncology, transplant, HBV and HCV infection. as well as treating minimal residual disease or advanced tumors, and may have roles in immune reconstitution or enhancement of immunotherapy. As the reported half-life of TL-7 in humans is approximately 10 h (Sportès, C. et al. Phase I Study of Recombinant Human Interleukin-7 Administration in Subjects with Refractory Malignancy. Clin Cancer Res 2010; 16:727-735), its utility in unmodified form is limited.

[0309] “Fibroblast growth factor 18” or “FGF-18” means the human protein (UniProt No. 076093(28-207)) encoded by the FGF18 gene, having the sequence EENVDFRIHVENQTRARDDVSRKQLRLYQLYSRTSGKHIQVLGRRISARGEDGDKYAQL LVETDTFGSQVRIKGKETEFYLCMNRKGKLVGKPDGTSKECVFTEKVLENNYTALMSAK YSGWYVGFTKKGRPRKGPKTRENQQDVHFMKRYPKGQPELQKPFKYTTVTKRSRRTRP THPA (SEQ ID NO: 563) and recombinant and synthetic versions and sequence variants thereof having at least a portion of the biological activity of native FGF-18 FGF-18 is a protein member of the fibroblast growth factor (FGF) family. FGF family members possess broad mitogenic and cell survival activities, and are involved in a variety of biological processes, including embryonic development, cell growth, morphogenesis, tissue repair, tumor growth, and invasion. It has been shown in vitro that this protein is able to induce neurite outgrowth in PC12 cells. FGF-18 stimulates the proliferation of chondrocyte & osteoblasts (cells that produce and maintain bone and cartilage) and its use is considered for the repair and generation of the cartilage, for example in the knee joints (Ellsworth J L. Fibroblast growth factor-18 is a trophic factor for mature chondrocytes and their progenitors. Osteoarthritis Cartilage (2002) 10:308-320).

[0310] “Alpha-Melanocyte Stimulating Hormone” or “α-MSH” is the 13-amino acid peptide generated as a proteolyic cleavage product from ACTH (1-13). which is in turn a cleavage product of proopiomelanocortin (POMC), having the sequence N-Ac-SYSMGFRWGLPV (SEQ ID NO: 564), and synthetic versions and sequence variants thereof having at least a portion of the biological activity of native ax-MSH. Alpha-MSH is a non-selective agonist of the melanocortin receptors MC1, MC3, MC4 & MC5 but not MC2 (which is exclusive for ACTH). Alpha-MSH stimulates melanocytes to produce & release melanin which has a photo-protective effect: it signals the brain, which has effects on appetite and sexual arousal. It is considered for use in treating erythropoietic protoporphyria (EPP, intolerant to sun), nonsegmental vitilligo (skin discoloration), actinic keratosis (AK. solar keratosis, precursor to skin cancer), polymorphous light eruption (PLE/PMLE), post-surgery kidney damage, erectile dysfunction, and sexual dysfunction. Because its half-life is mere seconds, its utility in unmodified form is limited.

[0311] “Endostatin” means the naturally-occurring 20-kDa C-terminal fragment derived from type XVIII collagen (UniProt. No. P39060(1572-1754)) having the sequence HSHRDFQPVLHLVALNSPLSGGMRGIRGADFQCFQQARAVGLAGTFRAFLSSRLQDLYS IVRRADRAAVPIVNLKDELLFPSWEALFSGSEGPLKPGARIFSFDGKDVLRHPTWPQKSV WHGSDPNGRRLTESYCETWRTEAPSATGQASSLLGGRLLGQSAASCHHAYIVLCIENSF MTASK (SEQ ID NO: 565), and recombinant and synthetic versions and sequence variants thereof having at least a portion of the biological activity of native endostatin. Endostatin is an angiogenesis inhibitor and may interfere with the pro-angiogenic action of growth factors such as basic fibroblast growth factor (bFGF/FGF-2) and VEGF. It is considered for use in certain cancers. Because its half-life is 13 h (Thomas, J P et al. Phase I Pharmacokinetic and Pharmacodynamic Study of Recombinant Human Endostatin in Patients With Advanced Solid Tumors. J. Clin. Oncol. (2003) 21:223-231), its utility in unmodified form is limited.

[0312] “Humanin” means the peptide (UniProt No. Q8IVG9(1-24)) encoded by the MT-RNR2 gene, having the sequence MAPRGFSCLLLLTSEIDLPVKRRA (SEQ ID NO: 566). and recombinant and synthetic versions and sequence variants thereof having at least a portion of the biological activity of native humanin Humanin has a role in neuro-protection against cell death associated with Alzheimer's disease (AD). AD-specific insults, prion induced apoptosis & chemically induced neuronal damage (Hashimoto, Y, A rescue factor abolishing neuronal cell death by a wide spectrum of familial Alzheimer's disease genes and Aβ. PNAS (2001) 98:6336-6341). More recently. humanin was found to help improve insulin action and lower blood glucose levels (Muzumdar R H. Humanin: A Novel Central Regulator of Peripheral Insulin Action. PLoS One (2009) 4:e6334). Humanin s considered for use in treating Alzheimer's disease. diabetes, and vascular & cardiovascular diseases.

[0313] “Glucagon” means the human glucagon glucose regulating peptide having the sequence HSQGTFTSDYSKYLDSRRAQDFVQWLMNT (SEQ ID NO: 567), and recombinant and synthetic versions and sequence variants thereof having at least a portion of the biological activity of native glucagon. The term “glucagon” as used herein also includes peptide mimetics of glucagon. Native glucagon is produced by the pancreas, released when blood glucose levels start to fall too low, causing the liver to convert stored glycogen into glucose and release it into the bloodstream. While the action of glucagon is opposite that of insulin, which signals the body's cells to take in glucose from the blood, glucagon also stimulates the release of insulin, so that newly-available glucose in the bloodstream can be taken up and used by insulin-dependent tissues. Glucagon-containing polypeptides of the invention may find particular use in increasing blood glucose levels in individuals with extant hepatic glycogen stores and maintaining glucose homeostasis in diabetes. Glucagon has been cloned, as disclosed in U.S. Pat. No. 4,826,763.

[0314] “Glucagon-like protein-1” or “GLP-1” means human glucagon like peptide-1 and sequence variants thereof having at least a portion of the biological activity of native GLP-1. The term “GLP-1” includes human GLP-1(1-37) having the sequence HDEFERHAEGTFTSDVSSTLEGQAALEFIAWLVKGRG (SEQ ID NO: 568), GLP-1(7-37), and GLP-1(7-36)amide. GLP-1 stimulates insulin secretion, but only during periods of hyperglycemia. The safety of GLP-1 compared to insulin is enhanced by this property and by the observation that the amount of insulin secreted is proportional to the magnitude of the hyperglycemia. The biological half-life of GLP-1(7-37)OH is a mere 3 to 5 minutes (U.S. Pat. No. 5,118,666). GLP-1-containing polypeptides of the invention may find particular use in the treatment of diabetes and insulin-resistance disorders for glucose regulation. GLP-1 has been cloned and derivatives prepared, as described in U.S. Pat. No. 5,118,666.

[0315] “Glucagon-like protein-2” or “GLP-2” means, collectively herein, human glucagon like peptide-2 having the sequence HADGSFSDEMNTILDNLAARDFINWLIQTKITD (SEQ ID NO: 569), species homologs of human GLP-2, and non-natural sequence variants having at least a portion of the biological activity of mature GLP-2 including variants such as, but not limited to, a variant with glycine substituted for alanine at position 2 of the mature sequence resulting in HGDGSFSDEMNTILDNLAARDFINWLIQTKITD (SEQ ID NO: 570) (“2G”) as well as Val, Glu, Lys, Arg, Leu or Ile substituted for alanine at position 2. GLP-2 or sequence variants have been isolated, synthesized, characterized, or cloned, as described in U.S. Pat. Nos. 5,789,379; 5,834,428; 5,990,077; 5,994,500; 6,184,201; 7,186,683; 7,563,770; 20020025933; and 20030162703.

[0316] “Insulin” means human insulin or a homolog, species variants, or sequence variants thereof that includes, but is not limited to, the mature human insulin protein composed of 51 amino acids with a molecular weight of 5808 Da and the proinsulin precursor of 110 amino acids. The precursor protein is processed to mature insulin that has an A-chain with sequence GIVEQCCTSICSLYQLENYCN (SEQ ID NO: 571) and a B-chain with sequence FVNQHLCGSHLVEALYLVCGERGFFYTPKT (SEQ ID NO: 572) bound together by disulfide bonds.

[0317] “Factor XIII A chain”, “FXIIIA” or “F13A” means the coagulation protein (UniProt No. P00488(2-732)) having the sequence SETSRTAFGGRRAVPPNNSNAAEDDLPTVELQGVVPRGVNLQEFLNVTSVHLFKERWDT NKVDHHTDKYENNKLIVRRGQSFYVQIDFSRPYDPRRDLFRVEYVIGRYPQENKGTYIP VPIVSELQSGKWGAKIVMREDRSVRLSIQSSPKCIVGKFRMYVAVWTPYGVLRTSRNPE TDTYILFNPWCEDDAVYLDNEKEREEYVLNDIGVIFYGEVNDIKTRSWSYGQFEDGILDT CLYVMDRAQMDLSGRGNPIKVSRVGSAMVNAKDDEGVLVGSWDNIYAYGVPPSAWT GSVDILLEYRSSENPVRYGQCWVFAGVFNTFLRCLGIPARIVTNYFSAHDNDANLQMDIF LEEDGNVNSKLTKDSVWNYHCWNEAWMTRPDLPVGFGGWQAVDSTPQENSDGMYRC GPASVQAIKHGHVCFQFDAPFVFAEVNSDLIYITAKKDGTHVVENVDATHIGKLIVTKQI GGDGMMDITDTYKFQEGQEEERLALETALMYGAKKPLNTEGVMKSRSNVDMDFEVEN AVLGKDFKLSITFRNNSHNRYTITAYLSANITFYTGVPKAEFKKETFDVTLEPLSFKKEAV LIQAGEYMGQLLEQASLHFFVTARINETRDVLAKQKSTVLTIPEIIIKVRGTQVVGSDMT VTVQFTNPLKETLRNVWVHLDGPGVTRPMKKMFREIRPNSTVQWEEVCRPWVSGHRK LIASMSSDSLRHVYGELDVQIQRRPSM (SEQ ID NO: 573), and recombinant and synthetic versions and sequence variants thereof having at least a portion of the biological activity of native FXIIIA. Factor XIII is the last enzyme in the coagulation cascade and is responsible for cross-linking fibrin molecules to each other in a newly formed blood clot. By forming intermolecular covalent bonds between fibrin monomers and by cross-linking alpha-2 antiplasmin, fibrinogen, fibronectin. collagen, and other proteins to enhance the mechanical strength of the fibrin clot, protect from proteolytic degradation, and provide stability to the extracellular matrix. Plasma FXIII circulates as a heterotetramer composed of 2 A subunits and 2 B subunits noncovalently linked together and bound to fibrinogen. The B subunit, which appears to stabilize the structure of the A subunit and to protect the A subunit from proteolysis, is normally present in excess in plasma as free FXIII-B subunit. Most patients with FXIII deficiency have mutations in the FXIII-A subunit. few cases of patients with FXIII-B subunit mutations have been reported (Mikkola, H, 1996, Semin Thromb Hemost. 22:393; Ichinose A. 1996, Semin Thromb Hemost 22:385). FXIIIA is used or is considered for use in treating hemophilia and related coagulopathies, congenital FXIII deficiency, and acquired FXIII deficiency due to chronic liver disease, inflammatory bowel disease, and post-surgery bleeding

[0318] “Factor X” or “FX” means the coagulation protein (UniProt No. P0074212-488)) having the sequence GRPLHLVLLSASLAGLLLLGESLFIRREQANNILARVTRANSFLEEMKKGHLERECMEET CSYEEAREVFEDSDKTNEFWNKYKDGDQCETSPCQNQGKCKDGLGEYTCTCLEGFEGK NCELFTRKLCSLDNGDCDQFCHEEQNSVVCSCARGYTLADNGKACIPTGPYPCGKQTLE RRKRSVAQATSSSGEAPDSITWKPYDAADLDPTENPFDLLDFNQTQPERGDNNLTRIVG GQECKDGECPWQALLINEENEGFCGGTILSEFYILTAAHCLYQAKRFKVRVGDRNTEQE EGGEAVHEVEVVIKHNRFTKETYDFDIAVLRLKTPITFRMNVAPACLPERDWAESTLMT QKTGIVSGFGRTHEKGRQSTRLKMLEVPYVDRNSCKLSSSFIITQNMFCAGYDTKQEDA CQGDSGGPHVTRFKDTYFVTGIVSWGEGCARKGKYGIYTKVTAFLKWIDRSMKTRGLP KAKSHAPEVITSSPLK (SEQ ID NO: 574), and recombinant and synthetic versions and sequence variants thereof having at least a portion of the biological activity of native FX Factor X is activated into factor Xa by both factor IX (with its cofactor. factor VIII, to make a complex known as intrinsic Xase) and factor VII with its cofactor, tissue factor (to make a complex known as extrinsic Xase). Factor X is the first member of the final common (or thrombin) pathway. Factor X is used to treat factor X deficiency, hemophilia A & B using bypass strategies due to FVIII and FIX patients developing inhibitory antibodies to FVIII and FIX replacement therapies), emergency treatment of patients with hemorrhages due to oral anticoagulants overdose or unknown causes of critical bleeding, and patients who develop acquired FX deficiency caused by lack of vitamin K, amyloidosis, severe liver disease & use of anticoagulants (e.g. warfarin). While the half-life of mature factor X is 40-45 h, the plasma half-life of activated factor X (Fxa) is <1-2 min ((Bunce M W, 2008. Blood, 117:290). making its utility in unmodified form limited being rapidly inactivated by anti-thrombin III & TFP1.

[0319] 4. Nucleic Acids as Payloads

[0320] The invention also contemplates the use of nucleic acids as payloads in the XTEN conjugates. In one embodiment, the invention provides XTEN-payload conjugates wherein the payload is selected from the group consisting of aptamers, antisense oligonucleotides, ribozyme nucleic acids, RNA interference nucleic acids, and antigene nucleic acids. Such nucleic acids used as therapeutics are know in the art (Edwin Jarald, Nucleic acid drugs: a novel approach. African Journal of Biotechnology Vol. 3 (12):662-666, 2004; Joanna B. Opalinska. Nucleic-acid therapeutics: basic principles and recent applications. Nature Reviews Drug Discovery 1:503-514, 2002).

### IV). XTEN-Cross-Linker and XTEN-Payload Conjugates and Methods of Making Such Conjugates

[0321] The present invention relates in part to highly purified preparations of XTEN-cross-linker conjugate compositions useful as conjugation partners to which payloads are conjugated, as described herein. The invention also relates to highly purified preparations of payloads linked to one or more XTEN using the XTEN-cross-linker conjugation partners. The present invention encompasses compositions and methods of making the XTEN-payload conjugates formed by linking of any of the herein described XTEN with a payload, as well as reactive compositions and methods of making the compositions formed by conjugating XTEN with a cross-linker or other chemical methods described herein. It is specifically intended that the terms “XTEN-payload” and “XTEN-cross-linker” encompass the linked reaction products remaining after the conjugation of the reactant conjugation partners, including the reaction products of cross-linkers, click-chemistry reactants, or other methods described herein.

[0322] In some embodiments, the XTEN utilized to create the subject conjugates comprise XTEN selected from any one of the sequences in Table 2, Table 3, and Tables 22-25, which may be linked to the payload component directly or via cross-linkers disclosed herein. In other embodiments, the one or more XTEN utilized to create the subject conjugates individually comprise an XTEN sequence having at least about 80% sequence identity, or alternatively 81%, 82%, 83%, 84%, 85%, 86%, 87%, 88%, 89%, 90%, 91%, 92%, 93%, 94%, 95%, 96%, 97%, 98%, 99%, or 100% sequence identity compared to an XTEN selected from Tables 2, 3, and 22-25 or a fragment thereof, when optimally aligned with a sequence of comparable length. In one embodiment, the subject conjugates are multimeric in that they comprise a first and a second XTEN sequence, wherein the XTEN are the same or they are different and wherein each individually comprises an XTEN sequence having at least about 80% sequence identity, or alternatively 81%, 82%, 83%, 84%, 85%, 86%, 87%, 88%, 89%, 90%, 91%, 92%, 93%, 94%, 95%, 96%, 97%, 98%, 99%, or 100% sequence identity compared to an XTEN selected from Tables 2, 3, and 22-25 or a fragment thereof, when optimally aligned with a sequence of comparable length. In another embodiment, the subject conjugates are multimeric in that they comprise a first, a second, and a third XTEN sequence, wherein the XTEN are the same or they are different and wherein each individually comprises an XTEN sequence having at least about 80% sequence identity, or alternatively 81%, 82%, 83%, 84%, 85%, 86%, 87%, 88%, 89%, 90%, 91%, 92%, 93%, 94%, 95%, 96%, 97%, 98%, 99%, or 100% sequence identity compared to an XTEN selected from Tables 2, 3, 22-25 or a fragment thereof, when optimally aligned with a sequence of comparable length. In yet another embodiment, the subject conjugates are multimeric in that they comprise 3, 4, 5, 6 or more XTEN sequences, wherein the XTEN are the same or they are different and wherein each individually comprises an XTEN sequence having at least about 80% sequence identity, or alternatively 81%, 82%, 83%, 84%, 85%, 86%, 87%, 88%, 89%, 90%, 91%, 92%, 93%, 94%, 95%, 96%, 97%, 98%, 99%, or 100% sequence identity compared to an XTEN selected from Tables 2, 3, and 22-25 or a fragment thereof. In the multimeric conjugates, the cumulative length of the residues in the XTEN sequences is greater than about 200 to about 3000 or about 400 to about 1000 amino acid residues, and the XTEN can be identical or they can be different in sequence or in length. As used herein, cumulative length is intended to encompass the total length, in amino acid residues, when more than one XTEN is incorporated into the conjugate.

[0323] In one aspect, the invention provides compositions of XTEN covalently linked to a small molecule payload drug, resulting in an XTEN-drug conjugate (“XTEN-D”). In another aspect, the invention provides compositions of XTEN covalently linked to a payload biologically active protein (which encompasses peptides or polypeptides), resulting in an XTEN-peptide/polypeptide conjugate (“XTEN-P”). In another aspect, the invention provides compositions of one or more XTEN recombinantly linked to a payload peptide or polypeptide, resulting in an XTEN-peptide/polypeptide recombinant fusion protein (“XTEN-PR”). In another aspect, the invention provides compositions of one or more XTEN linked to payloads of one or more drugs and one or more proteins that can be biologically active or can be targeting moieties. In particular, the invention provides isolated XTEN-D, XTEN-P, XTEN-PR, and XTEN-D-P compositions useful in the treatment of a condition for which the administration of a payload drug and/or protein is known in the art to be useful in the treatment, amelioration or prevention of a disease or condition in a subject. The XTEN-D conjugates generally comprise one or more of the following components: 1) XTEN; 2) cross-linker, and 3) payload to which the XTEN is chemically conjugated either directly or by use of a cross-linker, such as commercially-available cross-linkers described herein, or by use of click-chemistry reactants, or in some cases, may be created by conjugation between reactive groups in the XTEN and payload without the use of a linker as described herein. The XTEN-P generally comprise one or more of the following components: 1) XTEN; 2) cross-linker, and 3) biologically active protein payload, and are also generally created by conjugation with the use of a cross-linker or click-chemistry reactants. The XTEN-PR conjugates generally comprises one or more of the following components: 1) one or more XTEN; 2) a spacer sequence and 3) payload. The XTEN-D-P generally comprise one or more of the following components: 1) XTEN; 2) optional linker, 3) biologically active protein; and 4) drug, wherein the payloads are generally created by conjugation with the use of a cross-linker or click-chemistry reactants, as described above. However, in some cases of foregoing types of compositions, the composition can be created without the use of a cross-linker provided the components are otherwise chemically reactive.

[0324] The conjugation of XTEN to payloads confers several advantages on the resulting compositions compared to the payloads not linked to XTEN. As described more fully below, non-limiting examples of the enhanced properties include increases in the overall solubility and metabolic stability, reduced susceptibility to proteolysis in circulation, reduced immunogenicity, reduced rate of absorption when administered subcutaneously or intramuscularly, reduced clearance by the kidney, enhanced interactions with substrate, reduced toxicity, targeted delivery of payload, and enhanced pharmacokinetic properties. Enhanced pharmacokinetic properties of the conjugates compared to payload not linked to XTEN include longer terminal half-life (e.g., two-fold, three-fold, four-fold or more), increased area under the curve (AUC) (e.g., 25%, 50%, 100% or more), lower volume of distribution, slower absorption after subcutaneous or intramuscular injection (an advantage compared to commercially-available forms of payload that must be administered by a similar route) such that the Cmax is lower, which, in turn, results in reductions in adverse effects of the payload that, collectively, results in an increased period of time that a conjugation composition administered to a subject provides therapeutic activity. In some embodiments, the conjugation compositions comprise cleavage sequences (described more fully, below) that permits sustained release of active payload, such that the administered XTEN-payload acts as a depot when subcutaneously or intramuscularly administered. It is specifically contemplated that XTEN-payload conjugates can exhibit one or more or any combination of the improved properties disclosed herein. As a result of these enhanced properties, the XTEN-payload conjugates permit less frequent dosing, more tailored dosing, and/or reduced toxicity compared to payload not linked to XTEN and administered in a comparable fashion. Such XTEN-payload conjugates have utility to treat certain conditions known in the art to be affected, ameliorated, or prevented by administration of the payload to a subject in need thereof., as described herein.

### 1. Cross-Linker and Azide/Alkyne Click-Chemistry Reactants for Conjugation

[0325] In another aspect, the invention relates to XTEN conjugated to cross-linkers, resulting in XTEN-cross-linker conjugates that can be utilized to prepare XTEN-payload conjugation compositions. In particular, the herein-described XTEN-cross-linker conjugate partners are useful for conjugation to payload agents or surfaces bearing at least one thiol, amino, carboxyl, aldehyde or alcohol or any other reactive group available and suitable, as known in the art, for reaction between the components described herein.

[0326] In another aspect, the invention relates to methods of making conjugates of XTEN-cross-linker reactants and XTEN-click-chemistry azide/alkyne reactants, resulting in conjugates that can be utilized to prepare the subject XTEN-payload compositions. In particular, the herein-described methods for making XTEN-cross-linkers and XTEN-azide/alkyne reactants are useful wherein the payload agent or a reaction surface bears at least one thiol, amino, carboxyl, aldehyde, alkene, alkyne, heterocycle, alcohol, or other reactive group available for reaction.

[0327] Exemplary embodiments of XTEN have been described above, including preparations of substantially homogeneous XTEN. The invention provides XTEN that further serve as a platform to which payloads can be conjugated, such that they serve as a “carrier”, conferring certain desirable pharmacokinetic, chemical and pharmaceutical properties to the compositions, amongst other properties described below. In other embodiments, the invention provides polynucleotides that encode XTEN that can be linked to genes encoding peptide or polypeptide payloads that can be incorporated into expression vectors and incorporated into suitable hosts for the expression and recovery of the subject XTEN-payload recombinant fusion proteins.

[0328] In some embodiments, the XTEN components as described herein, above, are engineered to incorporate a defined number of reactive amino acid residues that can be reacted with cross-linking agents or can further contain reactive groups that can be used to conjugate to payloads. In one embodiment, the invention provides cysteine-engineered XTEN wherein the cysteine, each of which contains a reactive thiol group, are conjugated to a cross-linker, resulting in an XTEN-cross-linker conjugate. In another embodiment, invention provides lysine-engineered XTEN wherein lysine, each of which contains a positively charged hydrophilic ε-amino group, are conjugated to a cross-linker, resulting in an XTEN-cross-linker conjugate. In the embodiments of cysteine-engineered XTEN, each comprises about 1 to about 100 cysteine amino acids, or from 1 to about 50 cysteine amino acids, or from 1 to about 40 cysteine amino acids, or from 1 to about 20 cysteine amino acids, or from 1 to about 10 cysteine amino acids, or from 1 to about 5 cysteine amino acids, or 9 cysteines, or 3 cysteines, or a single cysteine amino acid that is available for conjugation. In the embodiments of lysine-engineered XTEN, each comprises about 1 to about 100 lysine amino acids, or from 1 to about 50 lysine amino acids, or from 1 to about 40 lysine engineered amino acids, or from 1 to about 20 lysine engineered amino acids, or from 1 to about 10 lysine engineered amino acids, or from 1 to about 5 lysine engineered amino acids, or 9 cysteines, or 3 cysteines, or a single lysine that is available for conjugation. In another embodiment, the engineered XTEN comprises both cysteine and lysine residues of the foregoing ranges or numbers.

[0329] Generally, XTEN cysteine thiol groups are more reactive, i.e., more nucleophilic, towards electrophilic conjugation reagents than amine or hydroxyl groups. In addition, cysteine residues are generally found in smaller numbers in a given protein; thus are less likely to result in multiple conjugations within the same protein. Cysteine residues have been introduced into proteins by genetic engineering techniques to form covalent attachments to ligands or to form new intramolecular disulfide bonds (Better et al (1994) J. Biol. Chem. 13:9644-9650; Bernhard et al (1994) Bioconjugate Chem. 5:126-132; Greenwood et al (1994) Therapeutic Immunology 1:247-255; Tu et al (1999) Proc. Natl. Acad. Sci USA 96:4862-4867; Kanno et al (2000) J. of Biotechnology, 76:207-214; Chmura et al (2001) Proc. Nat. Acad. Sci. USA 98(15):8480-8484; U.S. Pat. No. 6,248,564).

[0330] In one embodiment, the invention provides an isolated composition comprising a cysteine-engineered XTEN conjugated to a cross-linker, wherein the cross-linker is selected from sulfhydryl-reactive homobifunctional or heterobifunctional cross-linkers. In another embodiment, the invention provides an isolated composition comprising a lysine-engineered XTEN conjugated by a cross-linker, wherein the cross-linker is selected from amine-reactive homobifunctional or heterobifunctional cross-linkers. Cross-linking is the process of chemically linking two or more molecules by a covalent bond. The process is also called conjugation or bioconjugation with reference to its use with proteins and other biomolecules. For example, proteins can be modified to alter N- and C-termini, and amino acid side chains on proteins and peptides in order to block or expose reactive binding sites, inactivate functions, or change functional groups to create new targets for cross-linking.

[0331] In one aspect, the invention provides methods for the site-specific conjugation to XTEN polymer, accomplished using chemically-active amino acid residues or their derivatives (e.g., the N-terminal α-amine group, the ε-amine group of lysine, the thiol group of cysteine, the C-terminal carboxyl group, carboxyl groups of glutamic acid and aspartic acid. Functional groups suitable for reactions with primary α- and ε-amino groups are chlorocyanurates, dichlorotreazines, trezylates, benzotriazole carbonates, p-nitrophenyl carbonates, trichlorophenyl carbonates, aldehydes, mixed anhydrides, carbonylimidazoles, imidoesters, N-hydroxysuccinimide esters, N-hydroxysulfosuccinimide esters (Harris, J. M., Herati, R. S. Polym. Prepr. (Am. Chem. Soc., Div. Polym. Chem), 32(1), 154-155 (1991); Herman, S., et al. Macromol. Chem. Phys. 195, 203-209 (1994); Roberts, M. J. et. al. Advanced Drug Delivery Reviews, 54, 459-476 (2002)). N-hydroxysuccinimide esters (NHS-esters and their water soluble analogs sulfo-NHS-esters) are commonly used for protein conjugation (see FIG. 2). NHS-esters yield stable amide products upon reaction with primary amines with relatively efficient coupling at physiological pH. The conjugation reactions are typically performed in 50-200 mM phosphate, bicarbonate/carbonate, HEPES or borate buffers (pH between 7 and 9) at 4° C. to room temperature from 0.5 to 2 hrs. NHS-esters are usually used at two- to 50-fold molar excess to protein. Typically, the concentration of the reagent can vary from 0.1-10 mM, while the optimal protein concentration is 50-100 μM.

[0332] In another method, given that XTEN polypeptides possess only a single N-terminal α-amino group, the XTEN can be engineered to contain additional ε-amino group(s) of intentionally incorporated lysine residues; exemplary sequences of which are provided in Table 3. The α- and ε-amino groups have different pKa values: approximately 7.6 to 8.0 for the α-amino group of the N-terminal amino acid, and approximately 10-10.5 for the ε-amino group of lysine. Such a significant difference in pKa values can be used for selective modification of amino groups. Deprotonation of all primary amines occurs at pH above pH 8.0. In this environment, the nucleophilic properties of different amines determine their reactivity. When deprotonated, the more nucleophilic ε-amino groups of lysines are generally more reactive toward electrophiles than α-amino groups. On the other hand, at a lower pH (for example pH 6), the more acidic α-amino groups are generally more deprotonated than ε-amino groups, and the order of reactivity is inverted. For example, the FDA-approved drug Neulasta (pegfilgranstim) is granulocyte colony-stimulating factor (G-CSF) modified by covalent attachment of 20 kDa PEG-aldehyde. Specific modification of the protein's N-terminal amino acid was accomplished by exploiting the lower pKa of α-amino group as compared to ε-amino groups of internal lysines (Molineaux, G. Curr. Pharm. Des. 10, 1235-1244 (2004), U.S. Pat. No. 5,824,784).

[0333] The XTEN polypeptides comprising cysteine residues can be genetically engineered using recombinant methods described herein (see, e.g., Examples) or by standard methods known in the art. Conjugation to thiol groups can be carried using highly specific reactions, leading to the formation of single conjugate species joined by cross-linking agents. Functional groups suitable for reactions with cysteine thiol-groups are N-maleimides, haloacetyls, and pyridyl disulfides. The maleimide group reacts specifically with sulfhydryl groups when the pH of the reaction mixture is between pH 6.5 and 7.5, forming a stable thioether linkage that is not reversible (see FIG. 3). At neutral pH, maleimides react with sulfhydryls 1,000-fold faster than with amines, but when the pH is raised to greater than 8.5, the reaction favors primary amines. Maleimides do not react with tyrosines, histidines or methionines. For reaction solutions, thiols must be excluded from reaction buffers used with maleimides as they will compete for coupling sites. Excess maleimides in the reaction can be quenched at the end of a reaction by adding free thiols, while EDTA can be included in the coupling buffer to minimize oxidation of sulfhydryls.

[0334] In another embodiment, the invention contemplates use of haloacetyl reagents that are useful for cross-linking sulfhydryls groups of XTEN or payloads to prepare the subject conjugates. The most commonly used haloacetyl reagents contain an iodoacetyl group that reacts with sulfhydryl groups at physiological pH. The reaction of the iodoacetyl group with a sulfhydryl proceeds by nucleophilic substitution of iodine with a thiol producing a stable thioether linkage (see FIG. 4). Using a slight excess of the iodoacetyl group over the number of sulfhydryl groups at pH 8.3 ensures sulfhydryl selectivity. If a large excess of iodoacetyl group is used, the iodoacetyl group can react with other amino acids. Imidazoles can react with iodoacetyl groups at pH 6.9-7.0, but the incubation must proceed for longer than one week. Histidyl side chains and amino groups react in the unprotonated form with iodoacetyl groups above pH 5 and pH 7, respectively. In another embodiment, cross-linkers useful for sulfhydryls groups are pyridyl disulfides. Pyridyl disulfides react with sulfhydryl groups over a broad pH range (the optimal pH is 4-5) to form disulfide bonds linking XTEN to payloads (see FIG. 5). As a disulfide, conjugates prepared using these reagents are cleavable. During the reaction, a disulfide exchange occurs between the molecule's—SH group and the 2-pyridyldithiol group. As a result, pyridine-2-thione is released. These reagents can be used as crosslinkers and to introduce sulfhydryl groups into proteins. The disulfide exchange can be performed at physiological pH, although the reaction rate is slower.

[0335] The XTEN-payload conjugates comprising active synthetic peptides or polypeptides can be prepared using chemically active amino acid residues or their derivatives; e.g., the N-terminal α-amino group, the ε-amino group of lysine, a thiol group of cysteine, the carboxyl group of the C-terminal amino acid, a carboxyl group of aspartic acid or glutamic acid. Each peptide contains N-terminal α-amino group regardless of a primary amino acid sequence. If necessary, N-terminal α-amino group can be left protected/blocked upon chemical synthesis of the active peptide/polypeptide. The synthetic peptide/polypeptide may contain additional ε-amino group(s) of lysine that can be either natural or specifically substituted for conjugation. As described above, α- and ε-amino groups can be selectively modified at different pH. Another approach to selectively modify either α- or ε-amino group in a synthetic peptide is a reversible protection of amino groups with Di-tert-butyl dicarbonate (BOC₂). For example, selective BOC protection of vapreotide peptide (a synthetic somatostatin analog) has been achieved by modification at pH 6 (α-group protected) or pH 8.5 (s-group protected). The remaining free amino group was then specifically modified by PEG-N-hydroxysuccinimide or PEG-aldehyde. Finally, BOC protection was removed by acidic treatment to yield mono-modified peptides (Morpurgo, M. et al. Selective Alkylation and Acylation of a and E Amino Groups with PEG in a Somatostatin Analogue: Tailored Chemistry for Optimized Bioconjugates. Bioconjugate Chem. 2002. 13:1238-1243).

[0336] Since cysteines are generally less abundant in natural peptide and protein sequences than lysines, the use of cysteines as a site for conjugation reduces the likelihood of multiple conjugations to XTEN-cross-linker molecules in a reaction. It also reduces the likelihood of peptide/protein deactivation upon conjugation. Moreover, conjugation to cysteine sites can often be carried out in a well-defined manner, leading to the formation of single species XTEN polymer-peptide or XTEN polymer-polypeptide conjugates. In some cases cysteine may be absent in the amino acid sequence of the peptide to be conjugated. In such a case, cysteine residue can be added to the N- or C-terminus of the peptide either recombinantly or synthetically using standard methods. Alternatively, a selected amino acid can be chemically or genetically modified to cysteine. As one example, serine modification to cysteine is considered a conservative mutation. Another approach to introduce a thiol group in cysteine-lacking peptides is chemical modification of the lysine ε-amino group using thiolating reagents such as 2-iminothiolane (Traut's reagent), SATA (N-succinimidyl S-acetylthioacetate), SATP (N-succinimidyl S-acetylthiopropionate), SAT-PEO₄-Ac (N-Succinimidyl S-acetyl(thiotetraethylene glycol)), SPDP (N-Succinimidyl 3-(2-pyridyldithio)propionate), LC-SPDP (Succinimidyl 6-(3′-[2-pyridyldithio]propionamido)hexanoate) (described more fully, below). Once a unique thiol group is introduced in the peptide, it can be selectively modified by compounds containing sufhydryl-reactive such as N-maleimides, haloacetyls, and pyridyl disulfides, as described above.

[0337] The conjugation between the XTEN polypeptide and a peptide, protein or small molecule drug payload may be achieved by a variety of linkage chemistries, including commercially available zero-length, homo- or hetero-bifunctional, and multifunctional cross-linker compounds, according to methods known and available in the art, such as those described, for example, in R. F. Taylor (1991) “Protein immobilization. Fundamentals and Applications”, Marcel Dekker Inc., N.Y.; G. T. Hermanson et al. (1992) “Immobilized Affinity Ligand Techniques”, Academic Press, San Diego; G. T. Hermanson (2008) “Bioconjugate Techniques”, 2^{nd}. ed. Elsevier, Inc., S. S. Wong (1991) “Chemistry of Protein Conjugation and Crosslinking”, CRC Press, Boca Raton. Suitable cross-linking agents for use in preparing the conjugates of the disclosure are commercially-available from companies like Sigma-Aldrich, Thermo Fisher Scientific (Pierce Protein Research Products), Invitrogen, ProteoChem, G-Biosciences. Preferred embodiments of cross-linkers comprise a thiol-reactive functional group or an amino-reactive functional group. A list of exemplary cross-linkers is provided in Table 13.

TABLE 13
Exemplary cross-linkers
Cross-linker

maleimides, haloacetyls, pyridyl disulfides, haloacetyls, pyridyl disulfides, ABH (p-
Azidobenzoyl hydrazide), AMAS (N-(α-Maleimidoacetoxy)-succinimide ester), ANB-NOS (N-
5-Azido-2-nitrobenzyloxy-succinimide), APDP (N-(4-[p-Azidosalicylamido]butyl)-3′-(2′-
pyridyldithio) propionamide), ASBA (4-(p-Azidosalicylamido)-butylamine), BASED (Bis (β-[4-
azidosalicylamido]ethyl) disulfide), BMB (1,4-Bis-Maleimidobutane), BMDB (1,4
Bismaleimidyl-2,3-dihydroxybutane), BMH (Bis-Maleimidohexane), BMOE (Bis-
Maleimidoethane), BMPH (N-(β-Maleimidopropionic acid)hydrazide), BMPS (N-(β-
Maleimidopropyloxy)succinimide ester), BM(PEG)₂ (1,8-Bis-Maleimidodiethylene-glycol),
BM(PEG)₃ (1,11-Bis-Maleimidotriethyleneglycol), BS²G (Bis (sulfosuccinimidyl)glutarate), BS³
(Sulfo-DSS) (Bis (sulfosuccinimidyl)suberate), BS[PEG]₅ (Bis (NHS)PEG5), BS(PEG)₉ (Bis
(NHS)PEG9), BSOCOES (Bis(2-[succinimidoxycarbonyloxy]ethyl)sulfone), C6-SANH (C6-
Succinimidyl 4-hydrazinonicotinate acetone hydrazone), C6-SFB (C6-Succinimidyl 4-
formylbenzoate), DCC (N,N-Dicyclohexylcarbodiimide), DFDNB (1-5-Difluoro-2,4-
dinitrobenzene), DMA (Dimethyl adipimidate), DMP (Dimethyl pimelimidate), DMS (Dimethyl
suberimidate), DPDPB (1,4-Di-(3′-[2′pyridyldithio]propionamido) butane), DSG
(Disuccinimidyl glutarate), DSP (Dithiobis(succimidylpropionate), Lomant's Reagent), DSS
(Disuccinimidyl suberate), DST (Disuccinimidyl tartarate), DTBP (Dimethyl 3,3′-
dithiobispropionimidate), DTME (Dithiobis-maleimidoethane), DTSSP (Sulfo-DSP) (3,3′-
Dithiobis (sulfosuccinimidylpropionate)), EDC (1-Ethyl-3-(3-dimethylaminopropyl)
carbodiimide hydrochloride), EGS (Ethylene glycol bis(succinimidylsuccinate)), EMCA (N-ε-
Maleimidocaproic acid), EMCH (N-(ε-Maleimidocaproic acid)hydrazide), EMCS (N-(ε-
Maleimidocaproyloxy)succinimide ester), GMBS (N-(γ-Maleimidobutyryloxy)succinimide
ester), KMUA (N-κ-Maleimidoundecanoic acid), KMUH (N-(κ-Maleimidoundecanoic
acid)hydrazide), LC-SDA (NHS-LC-Diazirine), LC-SMCC (Succinimidyl 4-(N-
maleimidomethyl) cyclohexane-1-carboxy-(6-amidocaproate)), LC-SPDP (Succinimidyl 6-(3′-
[2-pyridyldithio]propionamido)hexanoate), MBS (m-Maleimidobenzoyl-N-hydroxysuccinimide
ester), MPBH (4-(4-N-Maleimidophenyl)-butyric acid hydrazide), NHS-ASA (N-
Hydroxysuccinimidyl-4-azidosalicylic acid), PDPH (3-(2-Pyridyldithio)propionylhydrazide),
PMPI (N-(p-Maleimidophenyl)isocyanate), SADP (Succinimidyl (4-azidophenyl dithio)
propionate), SAED (Succimidyl 2-[7-azido-4-methylcoumarin-3-acetamido]ethyl-1,3′-
dithiopropionate), SAND (Succinimidyl-2-(m-azido-o-nitrobenzamido)ethyl 1,3′-
dithiopropionate), SANH (Succinimidyl 4-hydrazinonicotinate acetone hydrazone), SANPAH
(N-Succinimidyl 6-(4′-azido-2′-nitrophenylamino)hexanoate), SASD (Succinimidyl-2-(p-
azidosalycylamido)ethyl-1,3-dithiopropionate), SBAP (Succinimdyl 3-
(bromoacetamido)propionate), SDA (NHS-Diazirine), SDAD (NHS-SS-Diazirine), SFAD
(Succinimidyl(perfluoroazidobenzamido)ethyl 1,3′-dithiopropionate), SFB (Succinimidyl 4-
formylbenzoate), SHTH (Succinimidyl 4-hydrazidoterephthalate), SIA (N-succinimidyl
iodoacetate), SIAB (N-Succinimidyl(4-iodoacetyl)aminobenzoate), SMPB (Succinimidyl 4-(p-
maleimidophenyl) butyrate), SMCC (Succinimidyl 4-(N-maleimido-methyl)cyclohexane-1-
carboxylate), SM[PEG]₂ (NHS-PEG2-Maliemide), SM[PEG]₄ (NHS-PEG4-Maliemide),
SM(PEG)₆ (NHS-PEG6-Maleimide), SM[PEG]₈ (NHS-PEG8-Maliemide), SM[PEG]₁₂ (NHS-
PEG12-Maliemide), SM(PEG)₂₄ (NHS-PEG24-Maleimide), SMPB (Succinimidyl 4-(p-
maleimido-phenyl)butyrate), SMPH (Succinimidyl-6-(β-maleimidopropionamido)hexanoate),
SMPT (4-Succinimidyloxycarbonyl-methyl-α-(2-pyridyldithio)toluene), SPB (Succinimidyl-(4-
psoralen-8-yloxy)butyrate), SPDP (N-Succinimidyl 3-(2-pyridyldithio)propionate), Sulfo-DST
(Sulfodisuccinimidyl tartrate), Sulfo-EGS (Ethylene glycol bis (sulfo-succinimidyl succinate)),
Sulfo-EMCS (N-(ε-Maleimidocaproyloxy)sulfosuccinimide ester), Sulfo-GMBS (N-(γ-
Maleimidobutryloxy)sulfosuccinimide ester), Sulfo-HSAB (N-Hydroxysulfosuccinimidyl-4-
azidobenzoate), Sulfo-KMUS (N-(κ-Maleimidoundecanoyloxy)sulfosuccinimide ester), Sulfo-
LC-SDA (Sulfo-NHS-LC-Diazirine), Sulfo-LC-SMPT (Sulfosuccinimidyl 6-(α-methyl-α-[2-
pyridyldithio]-toluamido)hexanoate), Sulfo-LC-SPDP (Sulfosuccinimidyl 6-(3′-[2-
pyridyldithio]propionamido)hexanoate), Sulfo-MBS (m-Maleimidobenzoyl-N-
hydroxysulfosuccinimide ester), Sulfo-NHS-LC-ASA (Sulfosuccinimidyl(4-azido-salicylamido)
hexanoate), Sulfo-SADP (Sulfosuccinimidyl (4-azidophenyl dithio) propionate), Sulfo-SAED
(Sulfosuccimidyl 2-[7-azido-4-methylcoumarin-3-acetamido]ethyl-1,3′-dithiopropionate), Sulfo-
SAND (Sulfosuccinimidyl-2-(m-azido-o-nitrobenzamido)ethyl 1,3′-dithiopropionate), Sulfo-
SANPAH (Sulfosuccinimidyl 6-(4′-azido-2′-nitrophenylamino)hexanoate), Sulfo-SASD
(Sulfosuccinimidyl-2-(p-azidosalycylamido)ethyl-1,3-dithiopropionate), Sulfo-SDA (Sulfo-
NHS-Diazirine), Sulfo-SDAD (Sulfo-NHS-SS-Diazirine), Sulfo-SFAD
(Sulfosuccinimidyl(perfluoroazidobenzamido)ethyl 1,3′-dithiopropionate), Sulfo-SIAB
(Sulfosuccinimidyl(4-iodo-acetyl)aminobenzoate), Sulfo-SMCC (Sulfosuccinimidyl 4-(N-
maleimidomethyl)cyclohexane-1-carboxylate), Sulfo-SMPB (Sulfosuccinimidyl 4-(p-
maleimidophenyl)butyrate), THPP (β-(Tris[hydroxymethyl]phosphine)propionic acid (betaine)),
TMEA (Tris-(2-Maleimidoethyl)amine), TSAT (Tris-(succinimidyl aminotriacetate)), 3-
propargyloxypropanoic acid, NHS ester, acetylene-PEG-NHS ester, dibenzylcyclooctyne,
(DBCO)-NHS ester, DBCO-PEG-NHS ester, cyclooctyne (COT)-NHS ester, COT-PEG-NHS
ester, COT-PEG-pentafluorophenyl (PFP) ester, BCOT-NHS ester, BCOT-PEG-NHS ester,
BCOT-PEG-pentafluorophenyl (PFP) ester, Acetylene-PEG4-maleimide, DBCO-maleimide,
COT-maleimide, BCOT-maleimide, 3-azide-propionic acid, NHS ester, 6-azide-hexanoic acid,
NHS ester, 3-azide-propionic acid, PFP ester, 6-azide-hexanoic acid, PFP ester, azide-PEG-NHS
ester, azide-PEG-PFP ester, azide-PEG-maleimide, N-(5-Aminopentyl)maleimide, aminopentyl-
maleimide

[0338] Non-limiting examples of cross-linkers are ABH (p-Azidobenzoyl hydrazide), AMAS (N-(α-Maleimidoacetoxy)-succinimide ester), ANB-NOS (N-5-Azido-2-nitrobenzyloxy-succinimide), APDP (N-(4-[p-Azidosalicylamido]butyl)-3′-(2′-pyridyldithio) propionamide), ASBA (4-(p-Azidosalicylamido)-butylamine), BASED (Bis (β-[4-azidosalicylamido]ethyl) disulfide), BMB (1,4-Bis-Maleimidobutane), BMDB (1,4 Bismaleimidyl-2,3-dihydroxybutane), BMH (Bis-Maleimidohexane), BMOE (Bis-Maleimidoethane), BMPH (N-(β-Maleimidopropionic acid)hydrazide), BMPS (N-(β-Maleimidopropyloxy)succinimide ester), BM(PEG)₂ (1,8-Bis-Maleimidodiethylene-glycol), BM(PEG)₃ (1,11-Bis-Maleimidotriethyleneglycol), BS²G (Bis (sulfosuccinimidyl)glutarate), BS³ (Sulfo-DSS) (Bis (sulfosuccinimidyl)suberate), BS[PEG]₅ (Bis (NHS)PEG5), BS(PEG), (Bis (NHS)PEG9), BSOCOES (Bis(2-[succinimidoxycarbonyloxy]ethyl)sulfone), C6-SANH (C6-Succinimidyl 4-hydrazinonicotinate acetone hydrazone), C6-SFB (C6-Succinimidyl 4-formylbenzoate), DCC (N,N-Dicyclohexylcarbodiimide), DFDNB (1-5-Difluoro-2,4-dinitrobenzene), DMA (Dimethyl adipimidate), DMP (Dimethyl pimelimidate), DMS (Dimethyl suberimidate), DPDPB (1,4-Di-(3′-[2′pyridyldithio]propionamido) butane), DSG (Disuccinimidyl glutarate), DSP (Dithiobis(succimidylpropionate), Lomant's Reagent), DSS (Disuccinimidyl suberate), DST (Disuccinimidyl tartarate), DTBP (Dimethyl 3,3′-dithiobispropionimidate), DTME (Dithiobis-maleimidoethane), DTSSP (Sulfo-DSP) (3,3′-Dithiobis (sulfosuccinimidylpropionate)), EDC (1-Ethyl-3-(3-dimethylaminopropyl) carbodiimide hydrochloride), EGS (Ethylene glycol bis(succinimidylsuccinate)), EMCA (N-ε-Maleimidocaproic acid), EMCH (N-(ε-Maleimidocaproic acid)hydrazide), EMCS (N-(ε-Maleimidocaproyloxy)succinimide ester), GMBS (N-(γ-Maleimidobutyryloxy)succinimide ester), KMUA (N-κ-Maleimidoundecanoic acid), KMUH (N-(κ-Maleimidoundecanoic acid)hydrazide), LC-SDA (NHS-LC-Diazirine), LC-SMCC (Succinimidyl 4-(N-maleimidomethyl) cyclohexane-1-carboxy-(6-amidocaproate)), LC-SPDP (Succinimidyl 6-(3′-[2-pyridyldithio]propionamido)hexanoate), MBS (m-Maleimidobenzoyl-N-hydroxysuccinimide ester), MPBH (4-(4-N-Maleimidophenyl)-butyric acid hydrazide), NHS-ASA (N-Hydroxysuccinimidyl-4-azidosalicylic acid), PDPH (3-(2-Pyridyldithio)propionylhydrazide), PMPI (N-(p-Maleimidophenyl)isocyanate), SADP (Succinimidyl (4-azidophenyl dithio) propionate), SAED (Succimidyl 2-[7-azido-4-methylcoumarin-3-acetamido]ethyl-1,3′-dithiopropionate), SAND (Succinimidyl-2-(m-azido-o-nitrobenzamido)ethyl 1,3′-dithiopropionate), SANH (Succinimidyl 4-hydrazinonicotinate acetone hydrazone), SANPAH (N-Succinimidyl 6-(4′-azido-2′-nitrophenylamino)hexanoate), SASD (Succinimidyl-2-(p-azidosalycylamido)ethyl-1,3-dithiopropionate), SBAP (Succinimdyl 3-(bromoacetamido)propionate), SDA (NHS-Diazirine), SDAD (NHS-SS-Diazirine), SFAD (Succinimidyl(perfluoroazidobenzamido)ethyl 1,3′-dithiopropionate), SFB (Succinimidyl 4-formylbenzoate), SHTH (Succinimidyl 4-hydrazidoterephthalate), SIA (N-succinimidyl iodoacetate), SIAB (N-Succinimidyl(4-iodoacetyl)aminobenzoate), SMPB (Succinimidyl 4-(p-maleimidophenyl) butyrate), SMCC (Succinimidyl 4-(N-maleimido-methyl)cyclohexane-1-carboxylate), SM[PEG]₂ (NHS-PEG2-Maliemide), SM[PEG]₄ (NHS-PEG4-Maliemide), SM(PEG)₆ (NHS-PEG6-Maleimide), SM[PEG]₈ (NHS-PEG8-Maliemide), SM[PEG]₁₂ (NHS-PEG12-Maliemide), SM(PEG)₂₄ (NHS-PEG24-Maleimide), SMPB (Succinimidyl 4-(p-maleimido-phenyl)butyrate), SMPH (Succinimidyl-6-(β-maleimidopropionamido)hexanoate), SMPT (4-Succinimidyloxycarbonyl-methyl-α-(2-pyridyldithio)toluene), SPB (Succinimidyl-(4-psoralen-8-yloxy)butyrate), SPDP (N-Succinimidyl 3-(2-pyridyldithio)propionate), Sulfo-DST (Sulfodisuccinimidyl tartrate), Sulfo-EGS (Ethylene glycol bis (sulfo-succinimidyl succinate)), Sulfo-EMCS (N-(ε-Maleimidocaproyloxy)sulfosuccinimide ester), Sulfo-GMBS (N-(γ-Maleimidobutryloxy)sulfosuccinimide ester), Sulfo-HSAB (N-Hydroxysulfosuccinimidyl-4-azidobenzoate), Sulfo-KMUS (N-(κ-Maleimidoundecanoyloxy)sulfosuccinimide ester), Sulfo-LC-SDA (Sulfo-NHS-LC-Diazirine), Sulfo-LC-SMPT (Sulfosuccinimidyl 6-(α-methyl-α-[2-pyridyldithio]-toluamido)hexanoate), Sulfo-LC-SPDP (Sulfosuccinimidyl 6-(3′-[2-pyridyldithio]propionamido)hexanoate), Sulfo-MBS (m-Maleimidobenzoyl-N-hydroxysulfosuccinimide ester), Sulfo-NHS-LC-ASA (Sulfosuccinimidyl(4-azido-salicylamido) hexanoate), Sulfo-SADP (Sulfosuccinimidyl (4-azidophenyl dithio) propionate), Sulfo-SAED (Sulfosuccimidyl 2-[7-azido-4-methylcoumarin-3-acetamido]ethyl-1,3′-dithiopropionate), Sulfo-SAND (Sulfosuccinimidyl-2-(m-azido-o-nitrobenzamido)ethyl 1,3′-dithiopropionate), Sulfo-SANPAH (Sulfosuccinimidyl 6-(4′-azido-2′-nitrophenylamino)hexanoate), Sulfo-SASD (Sulfosuccinimidyl-2-(p-azidosalycylamido)ethyl-1,3-dithiopropionate), Sulfo-SDA (Sulfo-NHS-Diazirine), Sulfo-SDAD (Sulfo-NHS-SS-Diazirine), Sulfo-SFAD (Sulfosuccinimidyl(perfluoroazidobenzamido)ethyl 1,3′-dithiopropionate), Sulfo-SIAB (Sulfosuccinimidyl(4-iodo-acetyl)aminobenzoate), Sulfo-SMCC (Sulfosuccinimidyl 4-(N-maleimidomethyl)cyclohexane-1-carboxylate), Sulfo-SMPB (Sulfosuccinimidyl 4-(p-maleimidophenyl)butyrate), THPP (β-(Tris[hydroxymethyl]phosphine)propionic acid (betaine)), TMEA (Tris-(2-Maleimidoethyl)amine), TSAT (Tris-(succinimidyl aminotriacetate)).

[0339] In some embodiments, XTEN-payload conjugates using cross-linking reagents introduce non-natural spacer arms. However, in cases where a native peptide bond is preferred, the invention provides that a reaction can be carried out using zero-length cross-linkers that act via activation of a carboxylate group. In the embodiments thereof, in order to achieve reaction selectivity, the first polypeptide has to contain only a free C-terminal carboxyl group while all lysine, glutamic acid and aspartic acid side chains are protected and the second peptide/protein N-terminal α-amine has to be the only available unprotected amino group (requiring that any lysines, asparagines or glutamines be protected). In such cases, use of XTEN AG family sequences of Table 2 that are without glutamic acid as the first polypeptide in the XTEN-payload or XTEN-cross-linker is preferred. Accordingly, in one embodiment, the invention provides XTEN-cross-linker and XTEN-payload comprising AG XTEN sequences wherein the compositions are conjugated to payloads using a zero-length cross-linkers. Exemplary zero-length cross-linkers utilized in the embodiment include but are not limited to DCC (N,N-Dicyclohexylcarbodiimide) and EDC (1-Ethyl-3-(3-dimethylaminopropyl) carbodiimide hydrochloride) wherein the cross-linkers are used to directly conjugate carboxyl functional groups of one molecule (such as a payload) to the primary amine of another molecule, such as a payload with that functional group (see FIG. 6). Sulfo-NHS (N-hydroxysulfosuccinimide) and NHS (N-hydroxysuccinimide) are used as catalysts for conjugation, increasing reaction efficiency (Grabarek Z, Gergely J. Zero-length crosslinking procedure with the use of active esters. (1990) Anal. Biochem. 185(1), 131-135). EDC reacts with carboxylic acid group and activates the carboxyl group to form an active O-acylisourea intermediate, allowing it to be coupled to the amino group in the reaction mixture. The O-acylisourea intermediate is unstable in aqueous solutions, making it ineffective in two-step conjugation procedures without increasing the stability of the intermediate using N-hydroxysuccinimide. This intermediate reacts with a primary amine to form an amide derivative. The crosslinking reaction is usually performed between pH 4.5 to 5 and requires only a few minutes for many applications. However, the yield of the reaction is similar at pH from 4.5 to 7.5. The hydrolysis of EDC is a competing reaction during coupling and is dependent on temperature, pH and buffer composition. 4-Morpholinoethanesulfonic acid (MES) is an effective carbodiimide reaction buffer. Phosphate buffers reduce the reaction efficiency of the EDC, but increasing the amount of EDC can compensate for the reduced efficiency. Tris, glycine and acetate buffers may not be used as conjugation buffers.

[0340] The invention also provides compositions in which three XTENs are linked by trivalent cross-linkers, resulting in trimeric XTEN-cross-linker conjugates. Trimeric cross-linkers can be created by connecting a symmetric trivalent core such as tertiary amine, trisubstituted methane or 1,3,5-trisubstituted benzene or asymmetric trivalent molecule such a LysLys dipeptide or a GluGlu dipeptide or a AspAsp dipeptide or a CysCysCys tripeptide by spacers with various reactive side groups described in Table 14, using standard conjugation techniques. In one embodiment, the invention provides compositions in which three XTENs are covalently linked by a trivalent cross-linker selected from the group consisting of thiol-reactive Tris-(2-Maleimidoethyl)amine (TMEA), amine-reactive Tris-(succimimidyl aminotricetate) (TSAT) and the cross-linkers set forth in Table 14.

TABLE 14
Trivalent Cross-linkers
Trivalent Cross-linker*

| Trivalent Core | Group 1 | Group 2 | Group 3 |
|---|---|---|---|
| Tertiary amine | Azide | Azide | Azide |
| Trisubstituted | Alkyne | Alkyne | Alkyne |
| methane | NHS | NHS | NHS |
| 1,3,5- | Maleimide | Maleimide | Maleimide |
| trisubstituted | Iodoacetyl | Iodoacetyl | Iodoacetyl |
| benzene | Azide | NHS | NHS |
| LysLys | Azide | Azide | NHS |
| GluGluGlu | Azide | Iodoacetyl | Iodoacetyl |
| AspAspAsp | Azide | Azide | Iodoacetyl |
| CysCysCys | Alkyne | NHS | NHS |
| | Alkyne | Alkyne | NHS |
| | Alkyne | Iodoacetyl | Iodoacetyl |
| | Alkyne | Alkyne | Iodoacetyl |
| | Alkyne | Maleimide | Maleimide |
| | Alkyne | Alkyne | Maleimide |
| | NHS | Maleimide | Maleimide |
| | NHS | NHS | Maleimide |
| | NHS | Alkyne | Maleimide |

*One of the trivalent core + any one of Group 1 + any one of Group 2 + any one of Group 3

[0341] In other embodiments, XTEN and payloads can be conjugated using a broad group of cross-linkers, including those consisting of a spacer arm (linear or branched) and two or more reactive ends that are capable of attaching to specific functional groups (e.g., primary amines, sulfhydryls, etc.) on proteins or other molecules. Linear cross-linkers can be homobifunctional or heterobifunctional. Homobifunctional cross-linkers have two identical reactive groups which are used to cross-link proteins in one step reaction procedure. Non-limiting examples of amine-reactive homobifunctional cross-linkers are BS2G (Bis (sulfosuccinimidyl)glutarate), BS3 (Sulfo-DSS) (Bis (sulfosuccinimidyl)suberate), BS[PEG]5 (Bis (NHS)PEG5), BS(PEG)9 (Bis (NHS)PEG9), BSOCOES (Bis(2-[succinimidoxycarbonyloxy]ethyl)sulfone), DFDNB (1-5-Difluoro-2,4-dinitrobenzene), DMA (Dimethyl adipimidate), DMP (Dimethyl pimelimidate), DMS (Dimethyl suberimidate), DSG (Disuccinimidyl glutarate), DSP (Dithiobis(succimidylpropionate) (Lomant's Reagent), DSS (Disuccinimidyl suberate), DST (Disuccinimidyl tartarate), DTBP (Dimethyl 3,3′-dithiobispropionimidate), DTSSP (Sulfo-DSP) (3,3′-Dithiobis (sulfosuccinimidylpropionate)), EGS (Ethylene glycol bis(succinimidylsuccinate)), Sulfo-EGS (Ethylene glycol bis (sulfo-succinimidyl succinate)).

[0342] Additionally, examples of homobifunctional cross-linkers employed in the compositions and in the methods to create the XTEN-payload and/or XTEN-cross-linker compositions are sulfhydryl-reactive agents such as BMB (1,4-Bis-Maleimidobutane), BMH (Bis-Maleimidohexane), BMDB (1,4 Bismaleimidyl-2,3-dihydroxybutane), BMOE (Bis-Maleimidoethane), BM(PEG)2 (1,8-Bis-Maleimidodiethylene-glycol), BM(PEG)3 (1,11-Bis-Maleimidotriethyleneglycol), DPDPB (1,4-Di-(3′-[2′pyridyldithio]propionamido) butane), DTME (Dithiobis-maleimidoethane).

[0343] For the creation of XTEN-cross-linker conjugates for subsequent conjugation to payloads, as well as the creation of XTEN-payload conjugates, heterobifunctional cross-linkers are preferred as the sequential reactions can be controlled. As heterobifunctional cross-linkers possess two different reactive groups, their use in the compositions allows for sequential two-step conjugation. A heterobifunctional reagent is reacted with a first protein using the more labile group. In one embodiment, the conjugation of the heterobifunctional cross-linker to a reactive group in an XTEN results in an XTEN-cross-linker conjugate. After completing the reaction and removing excess unreacted cross-linker, the modified protein (such as the XTEN-cross-linker) can be added to the payload which interacts with a second reactive group of the cross-linker, resulting in an XTEN-payload conjugate. Most commonly used heterobifunctional cross-linkers contain an amine-reactive group at one end and a sulfhydryl-reactive group at the other end. Accordingly, these cross-linkers are suitable for use with cysteine- or lysine-engineered XTEN, or with the alpha-amino group of the N-terminus of the XTEN. Non-limiting examples of heterobifunctional cross-linkers are AMAS (N-(α-Maleimidoacetoxy)-succinimide ester), BMPS (N-(β-Maleimidopropyloxy)succinimide ester), EMCS (N-(ε-Maleimidocaproyloxy)succinimide ester), GMBS (N-(γ-Maleimidobutyryloxy)succinimide ester), LC-SMCC (Succinimidyl 4-(N-maleimidomethyl) cyclohexane-1-carboxy-(6-amidocaproate)), LC-SPDP (Succinimidyl 6-(3′-[2-pyridyldithio]propionamido)hexanoate), MBS (m-Maleimidobenzoyl-N-hydroxysuccinimide ester), SBAP (Succinimdyl 3-(bromoacetamido)propionate), SIA (N-succinimidyl iodoacetate), SIAB (N-Succinimidyl(4-iodoacetyl)aminobenzoate), SMPB (Succinimidyl 4-(p-maleimidophenyl) butyrate), SMCC (Succinimidyl 4-(N-maleimido-methyl)cyclohexane-1-carboxylate), SM[PEG]₂ (NHS-PEG2-Maliemide), SM[PEG]₄ (NHS-PEG4-Maliemide), SM(PEG)₆ (NHS-PEG6-Maleimide), SM[PEG]₈ (NHS-PEG8-Maliemide), SM[PEG]₁₂(NHS-PEG12-Maliemide), SM(PEG)₂₄ (NHS-PEG24-Maleimide), SMPB (Succinimidyl 4-(p-maleimido-phenyl)butyrate), SMPH (Succinimidyl-6-(β-maleimidopropionamido)hexanoate), SMPT (4-Succinimidyloxycarbonyl-methyl-α-(2-pyridyldithio)toluene), SPDP (N-Succinimidyl 3-(2-pyridyldithio)propionate), Sulfo-EMCS (N-(ε-Maleimidocaproyloxy)sulfosuccinimide ester), Sulfo-GMBS (N-(γ-Maleimidobutryloxy)sulfosuccinimide ester), Sulfo-KMUS (N-(γ-Maleimidoundecanoyloxy)sulfosuccinimide ester), Sulfo-LC-SMPT (Sulfosuccinimidyl 6-(α-methyl-α-[2-pyridyldithio]-toluamido)hexanoate), Sulfo-LC-SPDP (Sulfosuccinimidyl 6-(3′-[2-pyridyldithio]propionamido)hexanoate), Sulfo-MBS (m-Maleimidobenzoyl-N-hydroxysulfosuccinimide ester), Sulfo-SIAB (Sulfosuccinimidyl(4-iodo-acetyl)aminobenzoate), Sulfo-SMCC (Sulfosuccinimidyl 4-(N-maleimidomethyl)cyclohexane-1-carboxylate), Sulfo-SMPB (Sulfosuccinimidyl 4-(p-maleimidophenyl)butyrate). An example of a heterobifunctional cross-linker that allows covalent conjugation of amine- and sulfhydryl-containing molecules is Sulfo-SMCC (SulfoSulfosuccinimidyl 4-(N-maleimidomethyl)cyclohexane-1-carboxylate). Sulfo-SMCC is a water soluble analog of SMCC that can be prepared in aqueous buffers up to 10 mM concentration. The cyclohexane ring in the spacer arm of this cross-linker decreases the rate of hydrolysis of the maleimide group compared to similar reagents not containing this ring. This feature enables XTEN that have been maleimide-activated with SMCC or Sulfo-SMCC to be lyophilized and stored for later conjugation to a sulfhydryl-containing molecule. Thus, in one embodiment, the invention provides an XTEN-cross-linker having an XTEN having at least about 80% sequence identity, or at least about 90%, or about 91%, or about 92%, or about 93%, or about 94%, or about 95%, or about 96%, or about 97%, or about 98%, or about 99% sequence identity, or is identical to a sequence or a fragment of a sequence selected from of Table 3, when optimally aligned, wherein XTEN-cross-linker has one or more cross-linkers of sulfo-SMCC linked to the α-amino group of the XTEN or the ε-amine of a lysine-engineered XTEN. In another embodiment, the invention provides an XTEN-cross-linker having an XTEN having at least about 80% sequence identity, or at least about 90%, or about 91%, or about 92%, or about 93%, or about 94%, or about 95%, or about 96%, or about 97%, or about 98%, or about 99% sequence identity, or is identical to a sequence or a fragment of a sequence selected from of Table 2, when optimally aligned., wherein the XTEN-cross-linker has one sulfo-SMCC linked to the amino group of the N-terminus of the XTEN. The foregoing described heterobifunctional cross-linkers conjugate two molecules via a single amine and a single cysteine. A special type of cross-linker was developed for site-specific conjugation to disulfide bridges in proteins (Balan S. et al. Site-specific PEGylation of protein disulfide bonds using a three-carbon bridge. (2007) Bioconjugate Chem. 18, 61-76; Brocchini S. et al. Disulfide bridge based PEGylation of proteins. (2008) Advanced Drug Delivery Reviews 60, 3-12). First, the linker is synthesized as an amine-specific 4-[2,2-bis[p-tolylsulfonyl)methyl]acetyl) benzoic acid-NHS ester. This molecule can be covalently attached to the amino group of XTEN yielding XTEN-Bis(sulfone). Incubation of the latter molecule in 50 mM sodium phosphate buffer, pH 7.8, will result in elimination of toluene sulfinic acid to generate XTEN-α,β-unsaturated 0′-monosulfone. The resulting molecule will react with a disulfide bridge-containing payload protein in a site-specific manner. In a first step the disulfide bridge is converted into two thiols by reduction. In a second step, the XTEN-monosulfone bis-alkylates two cysteines resulting in a chemically-stable three-carbon bridge. The same α,β-unsaturated β′-monosulfone can be used not only for conjugation to two thiol groups derived from a disulfide bridge but also for conjugation to polyhistidine tags (Cong Y. et al. Site-specific PEGylation at histidine tags. (2012) Bioconjugate Chem. 23, 248-263).

[0344] Conjugation using XTEN-cross-linker compositions with the sulfo-SMCC is usually performed in a two-step process. In one embodiment, the amine-containing protein is prepared in conjugation buffer of, e.g., phosphate-buffered saline (PBS=100 mM sodium phosphate, 150 mM sodium chloride, pH 7.2) or a comparable amine- and sulfhydryl-free buffer at pH 6.5-7.5. The addition of EDTA to 1-5 mM helps to chelate divalent metals, thereby reducing disulfide formation in the sulfhydryl-containing protein. The concentration of the amine-containing protein determines the cross-linker molar excess to be used. In general, in protein samples of <1 mg/ml utilize an 40-80-fold molar excess, protein samples of 1-4 mg/ml utilize a 20-fold molar excess, and protein samples of 5-10 mg/ml utilize a 5- to 10-fold molar excess of the cross-linker. The reaction mixture (amine-containing protein and cross-linker) is incubated for 30 minutes at room temperature or 2 hours at 4° C., and then the excess cross-linker is removed using a desalting column equilibrated with conjugation buffer. In the case of preparing a XTEN-cross-linker, the composition would be held at that point. In embodiments wherein the XTEN-cross-linker is conjugated to a payload, the sulfhydryl-containing payload and the XTEN-cross-linker conjugate are mixed in a molar ratio corresponding to that desired for the final conjugate (taking into account the number of expected cross-linkers conjugated to one or more amino groups per molecule of the XTEN) and consistent with the single sulfhydryl group that exists on the payload. The reaction mixture is incubated at room temperature for 30 minutes or 2 hours at 4° C. Conjugation efficiency can be estimated by SDS-PAGE followed by protein staining or by appropriate analytical chromatography technique such as reverse phase HPLC or cation/anion exchange chromatography.

[0345] In one embodiment, the invention provides XTEN-cross-linker conjugate compositions created using cross-linkers that are multivalent, resulting in compositions that have 2, 3, 4, 5, 6 or more XTEN. In another embodiment, the invention provides XTEN-cross-linker-payload conjugate compositions created using cross-linkers that are multivalent, resulting in compositions that have 2, 3, 4, 5, 6 or more XTEN linked to 1, 2, 3, 4, 5, 6 or more different payloads. Non-limiting examples of multivalent trifunctional cross-linkers are “Y-shaped” sulfhydryl-reactive TMEA (Tris-(2-Maleimidoethyl)amine) and amine-reactive TSAT (Tris-(succimimidyl aminotricetate). Any combination of reactive moieties can be designed using a scaffold polymer, either linear or branched, for multivalent compositions. Examples are shown in FIG. 7, wherein the constructs can have any combination of homo- or heterofunctional reactive groups. Of particular interest are trimeric configurations, shown schematically in FIGS. 21-23 and 97-105, and tetrameric configurations, shown in FIGS. 21 and 105-106. Not to be bound by a particular theory, a conjugate composition having three XTEN linked by a trifunctional linker (with payloads linked, in turn to XTEN via incorporated lysine or cysteine residues) can utilize proportionally shorter XTEN for each “arm” of the construct compared to a monovalent XTEN-payload composition wherein the same number of payloads are linked to the incorporated cysteine or lysine or N-terminal amino residues of each XTEN, and the resulting trimeric XTEN-payload composition will have a comparable apparent molecular weight and hydrodynamic radius as the monomeric XTEN-payload composition, yet will have lower viscosity, aiding administration of the composition to the subject through small-bore needles, and will provide equal or better potency from the payloads due to reduced steric hindrance and increased flexibility of the composition compared to the monomeric XTEN-payload composition having an equivalent number of XTEN amino acids.

[0346] In one embodiment, the invention provides a composition comprising three XTEN linked by a trivalent cross-linker wherein a solution containing approximately 100 mg/ml of protein of the composition has a viscosity that is at least about 5 cP, or about 6 cP, or about 7 cP, or about 8 cP, or about 9 cP, or about 10 cP lower than the corresponding linear XTEN of equal molecular weight and concentration. In another embodiment, the invention provides a composition comprising four XTEN linked by a tetravalent cross-linker wherein a solution containing approximately 100 mg/ml of protein of the composition has a viscosity that is at least about 5 cP, or about 6 cP, or about 7 cP, or about 8 cP, or about 9 cP, or about 10 cP lower than the corresponding linear XTEN of equal molecular weight and concentration.

[0347] Methods to make such compositions using the multivalent cross-linkers can employ similar reaction conditions as described herein, above, while an exemplary method and supporting data are provided in the Examples, below. Additionally, multivalent cross-linkers can be readily obtained by modification of lysine oligomers. For instance, the peptide Lys-Lys comprises three amino groups, one alpha-amino group and two epsilon amino groups at each Lys residue. These amino groups can be converted into many other reactive groups by reacting them with Bifunctional cross-linkers which have one amine-reactive group. For example the reaction of Lys-Lys with DBCO-NHS cross-linker yields a product that carries three DBCO groups. The reaction of Lys-Lys with NMal-NHS cross linker yields product that carries three NMal groups. In similar way one can obtain tetravalent cross-linkers based on Lys-Lys-Lys and higher valency cross-linkers by using longer lysine peptides.

[0348] Cross-linkers can be classified as either “homobifunctional” or “heterobifunctional” wherein homobifunctional cross-linkers have two or more identical reactive groups and are used in one-step reaction procedures to randomly link or polymerize molecules containing like functional groups, and heterobifunctional cross-linkers possess different reactive groups that allow for either single-step conjugation of molecules that have the respective target functional groups or allow for sequential (two-step) conjugations that minimize undesirable polymerization or self-conjugation. In a preferred embodiment, where XTEN-cross-linkers are prepared and isolated as compositions for subsequent reaction, the XTEN-cross-linker is linked to a heterbifunctional cross-linker and has at least one reactive group available for subsequent reaction.

[0349] In one embodiment, the invention provides XTEN-cross-linkers and XTEN-payloads that are conjugated utilizing cleavable cross-linkers with disulfide bonds. Typically, the cleavage is effected by disulfide bond reducing agents such as P-mercaptoethanol, DTT, TCEP, however it is specifically contemplated that such compositions would be cleavable endogenously in a slow-release fashion by conditions with endogenous reducing agents (such as cysteine and glutathione). The following are non-limiting examples of such cross-linkers: APDP (N-(4-[p-Azidosalicylamido]butyl)-3′-(2′-pyridyldithio) propionamide), BASED (Bis (β-[4-azidosalicylamido]ethyl) disulfide), DPDPB (1,4-Di-(3′-[2′pyridyldithio]propionamido) butane), DSP (Dithiobis(succimidylpropionate) (Lomant's Reagent), DTBP (Dimethyl 3,3′-dithiobispropionimidate), DTME (Dithiobis-maleimidoethane), DTSSP (Sulfo-DSP) (3,3′-Dithiobis (sulfosuccinimidylpropionate)), LC-SPDP (Succinimidyl 6-(3′-[2-pyridyldithio]propionamido)hexanoate), PDPH (3-(2-Pyridyldithio)propionylhydrazide), SDAD (NHS-SS-Diazirine), SMPT (4-Succinimidyloxycarbonyl-methyl-α-(2-pyridyldithio)toluene), SPDP (N-Succinimidyl 3-(2-pyridyldithio)propionate), Sulfo-LC-SMPT (Sulfosuccinimidyl 6-(α-methyl-α-[2-pyridyldithio]-toluamido)hexanoate), Sulfo-LC-SPDP (Sulfosuccinimidyl 6-(3′-[2-pyridyldithio]propionamido)hexanoate), Sulfo-SAED (Sulfosuccimidyl 2-[7-azido-4-methylcoumarin-3-acetamido]ethyl-1,3′-dithiopropionate), Sulfo-SAND (Sulfosuccinimidyl-2-(m-azido-o-nitrobenzamido)ethyl 1,3′-dithiopropionate), Sulfo-SDAD (Sulfo-NHS-SS-Diazirine), Sulfo-SFAD (Sulfosuccinimidyl(perfluoroazidobenzamido)ethyl 1,3′-dithiopropionate. In another embodiment, XTEN-payload conjugates comprising BSOCOES (Bis(2-[succinimidoxycarbonyloxy]ethyl)sulfone) can be cleaved under alkaline conditions. In another embodiment, XTEN-payload conjugates comprising DST (Disuccinimidyl tartarate) and BMDB (1,4 Bismaleimidyl-2,3-dihydroxybutane) can be cleaved by periodate oxidation. EGS (Ethylene glycol bis(succinimidylsuccinate)) and Sulfo-EGS (Ethylene glycol bis (sulfo-succinimidyl succinate)) are cleaved by hydroxylamine but would be expected to be cleaved endogenously such that the active payload would be released from the conjugate.

[0350] In general, the conjugation reagents described above assume that a cross-linker is reactive with the otherwise stable and inert groups such as amines, sulfhydryls and carboxyls. In other embodiments, the invention provides a different approach of conjugation based on separate modifications of the XTEN and payload with two functional groups which are stable and inactive toward biopolymers in general yet highly reactive toward each other. Several orthogonal reactions have been grouped under the concept of click chemistry, which provides XTEN-azide/alkyne reactants that have good stability properties and are therefor particularly suited as reagents for subsequent conjugation with payloads in a separate reaction (Kolb H. C., Finn M. G., Sharpless K. B. Click chemistry: diverse chemical function from a few good reactions. (2001) Angew. Chem. Int. Ed. Engl. 40(11), 2004-2021). Generally, click chemistry is used as a reaction concept which embraces reactions involving (1) alkyne-azide; (2) “ene”-thiol, and (3) aldehyde-hydrazide, and the invention contemplates use of all three. One example is the Huisgen 1,3-dipolar cycloaddition of alkynes to azides to form 1,4-disubstituted-1,2,3-triazoles, shown in FIG. 8. Azide and alkyne moieties can be introduced into peptide/protein or drug payloads or into XTEN by chemical modification of N-terminal α-amino groups, ε-amino groups of lysine, and sulfhydryl groups of cysteine. Table 15 provides non-limiting examples of click chemistry reactants contemplated for use in the making of the conjugate compositions, wherein one component of the intended conjugate (and XTEN or a payload) is reacted with a reactant 1 of the Table and the second component (a payload or an XTEN) is reacted with a azide reactant 2 of the Table. For example, one molecule is modified with an alkyne moiety using an amine-reactive alkyne, such as 3-propargyloxypropanoic acid, NHS ester, acetylene-PEG4-NHS ester, dibenzylcyclooctyne (DBCO)-NHS ester, DBCO-PEG4-NHS ester, cyclooctyne (COT)-PEG2-NHS ester, COT-PEG3-NHS ester, COT-PEG4-NHS ester, COT-PEG2-pentafluorophenyl (PFP) ester, COT-PEG3-PFP ester, COT-PEG4-PFP ester, BCOT-PEG2-NHS ester, BCOT-PEG3-NHS ester, BCOT-PEG4-NHS ester, BCOT-PEG2-PFP ester, BCOT-PEG3-PFP ester, BCOT-PEG4-PFP ester. Alternatively, the molecule is modified with a sulfhydryl-reactive alkyne such as acetylene-PEG4-Maleimide, DBCO-Maleimide, or DBCO-PEG4-Maleimide. The second molecule is modified with azide-PEG2-NHS ester, azide-PEG3-NHS ester, azide-PEG4-NHS ester, azide-PEG2-PFP ester, azide-PEG3-PFP ester, azide-PEG4-PFP ester or azide-PEG4-Maleimide. The azide and alkyne moieties can be used interchangeably; they are biologically unique, stable and inert towards biological molecules and aqueous environments. When mixed, the azide and alkyne reactants form an irreversible covalent bond without any side reactions (Moses J. E, and Moorhouse A. D. The growing applications of click chemistry. (2007) Chem. Soc. Rev. 36, 1249-1262; Breinbauer R, and Köhn M. Azide-alkyne coupling: a powerful reaction for bioconjugate chemistry. (2003) ChemBioChem 4(11), 1147-1149; Rostovtsev V. V., Green L. G., Fokin V. V., Sharpless K. B. A stepwise Huisgen cycloaddition process: copper(I)-catalyzed regioselective “ligation” of azides and terminal alkynes. (2002) Angew Chem Int Ed Engl. 41(14), 2596-2599). In one embodiment, the invention provides a conjugate comprising a first XTEN conjugated to a second XTEN wherein the first XTEN is linked to a alkyne reactant 1 from Table 15, the second XTEN is linked to a azide reactant 2 from Table 15, and then the first XTEN and the second XTEN are linked under conditions effective to react the alkyne reactant 1 and the azide reactant 2, resulting in the XTEN-XTEN conjugate. In another embodiment, the invention provides a conjugate comprising a first XTEN conjugated to a payload wherein the XTEN is linked to a alkyne reactant 1 from Table 15, the payload is linked to a azide reactant 2 from Table 15, and then the XTEN and the payload are linked under conditions effective to react the alkyne reactant 1 and the azide reactant 2, resulting in the XTEN-payload conjugate. In another embodiment, the invention provides a conjugate comprising a first XTEN conjugated to a payload wherein the XTEN is linked to a azide reactant 2 from Table 15, the payload is linked to a alkyne reactant 1 from Table 15, and then the XTEN and the payload are linked under conditions effective to react the alkyne reactant 1 and the azide reactant 2, resulting in the XTEN-payload conjugate. In the foregoing embodiments, the conditions to effect the reactions are those described herein or are reaction conditions known in the art for the conjugation of such reactants. The invention also contemplates the various combinations of the foregoing conjugates; e.g., an XTEN-XTEN conjugate in which the XTEN are linked by click chemistry reactants and in which one XTEN further comprises one or more molecules of a payload conjugated to the XTEN using click chemistry, an XTEN-XTEN conjugate in which the XTEN are linked by click chemistry reactants in which one XTEN further comprises one or more molecules of a first payload conjugated to the XTEN using click chemistry and the second XTEN further comprises one or more molecules of a second payload conjugated to the XTEN using click chemistry. Additional variations on these combinations will be readily apparent to those of ordinary skill in the art.

TABLE 15
Alkyne and Azide Click-chemistry Reactants

| Alkyne Reactant 1 | Attached to: | Azide Reactant 2 | Attached to: |
|---|---|---|---|
| 3-propargyloxy propanoic acid, | Amine | 3-azide-propionic acid, NHS | Amine |
| NHS ester* | | ester* | |
| acetylene-(oxyethyl)ₙ-NHS | Amine | 6-azide-hexanoic acid, NHS | Amine |
| ester*, where n is 1-10 | | ester* | |
| dibenzylcyclooctyne (DBCO)- | Amine | 3-azide-propionic acid, PFP | Amine |
| NHS ester* | | ester | |
| DBCO-(oxyethyl)ₙ- NHS ester*, | Amine | 6-azide-hexanoic acid, PFP | Amine |
| where n is 1-10 | | ester | |
| cyclooctyne (COT)-NHS ester* | Amine | azide-(oxyethyl)ₙNHS ester*, | Amine |
| | | where n is 1-10 | |
| COT-(oxyethyl)ₙ- NHS ester*, | Amine | azide-(oxyethyl)ₙ- PFP ester, | Amine |
| where n is 1-10 | | where n is 1-10 | |
| COT-(oxyethyl)ₙ- | Amine | 1-azido-3,6,9,12- | Amine |
| pentafluorophenyl (PFP) ester, | | tetraoxapentadecan-15-oic | |
| where n is 1-10 | | acid N-hydroxysuccinimide | |
| | | ester | |
| BCOT-NHS ester* | Amine | azide-(oxyethyl)ₙ- maleimide, | Thiol |
| | | where n is 1-10 | |
| BCOT-(oxyethyl)ₙ- NHS ester*, | Amine | | |
| where n is 1-10 | | | |
| BCOT-(oxyethyl)ₙ- | Amine | | |
| pentafluorophenyl (PFP) ester, | | | |
| where n is 1-10 | | | |
| 6-(11,12- | Amine | | |
| didehydrodibenzo[b,f]azocin- | | | |
| 5(6H)-yl)-6-oxohexanoic acid N- | | | |
| hydroxysulfosuccinimide ester | | | |
| ccetylene-(oxyethyl)ₙ- | Thiol | | |
| maleimide, where n is 1-10 | | | |
| DBCO-maleimide | Thiol | | |
| COT-maleimide | Thiol | | |
| BCOT-maleimide | Thiol | | |

*could be either NHS ester or sulfo-NHS ester

[0351] In some embodiments, the XTEN-XTEN conjugates and the XTEN-payload conjugates are conjugated using thio-ene based click chemistry that proceeds by free radical reaction, termed thiol-ene reaction, or anionic reaction, termed thiol Michael addition (see FIG. 9) (Hoyle C. E. and Bowman C. N. Thiol-ene click chemistry. (2010) Angew. Chem. Int. Ed 49, 1540-1573). It particular, is believed that thiol Michael addition is better suited for XTEN-payload conjugates wherein the payload is a protein (Pounder R. J. et. al. Metal free thiol-maleimide ‘Click’ reaction as a mild functionalisation strategy for degradable polymers. (2008) Chem Commun (Camb). 41, 5158-5160). As at least one molecule needs to contain a free thiol group, a cysteine-engineered XTEN can be utilized if the payload does not contain cysteine. Alternatively, the thiol group can be introduced by chemical modification of N-terminal α-amino group or the lysine ε-amino groups of either the XTEN or the payload peptide/protein using thiolating reagents such as 2-iminothiolane (Traut's reagent), SATA (N-succinimidyl S-acetylthioacetate), SATP (N-succinimidyl S-acetylthiopropionate), SAT-PEO₄-Ac (N-Succinimidyl S-acetyl(thiotetraethylene glycol)), SPDP (N-Succinimidyl 3-(2-pyridyldithio)propionate), LC-SPDP (Succinimidyl 6-(3′-[2-pyridyldithio]propionamido)hexanoate). Such methods are known in the art (Carlsson J. et al. (1978) Biochem. J. 173, 723-737; Wang D. et al. (1997) Bioconjug. Chem. 8, 878-884; Traut R. R. et al. (1973) Biochemistry 12(17), 3266-3273; Duncan, R. J. S. et. al. (1983) Anal. Biochem. 132. 68-73; U.S. Pat. No. 5,708,146). The second component of thiol-Michael addition reaction requires a reagent with electron-deficient carbon-carbon double bond, such as in (meth)acrylates, maleimides, α,β-unsaturated ketones, fumarate esters, acrylonitrile, cinnamates, and crotonates. The N-maleimides are commonly used as sulfhydryl-reactive functionalities and can be introduced into the payload protein or the XTEN molecule via N-terminal α-amino group or Lys s-amino group modification using commercially available heterobifunctional cross-linkers such as AMAS (N-(α-Maleimidoacetoxy)-succinimide ester), BMPS (N-(β-Maleimidopropyloxy)succinimide ester) and others described above. The resulting two molecules containing free thiol and maleimide moieties, respectively, form a stable covalent bond under mild conditions, resulting in a XTEN-payload linked by maleimide.

[0352] In other embodiments, XTEN-XTEN conjugates and XTEN-payload conjugates are created utilizing click chemistry based on reactions between hydrazides and aldehydes, such as described by Ganguly et al, and as shown in FIG. 10 (Ganguly T. et al. The hydrazide/hydrazone click reaction as a biomolecule labeling strategy for M(CO)3 (M=Re, 99mTc) radiopharmaceuticals. (2011) Chem. Commun. 47, 12846-12848). For example, an XTEN can be modified to have a hydrazine or hydrazide that is mixed with a payload having an aldehyde group to yield the desired XTEN-payload conjugate. In one embodiment, the invention provides XTEN with at least one hydrazine or hydrazide introduced in either the α-N-terminal amino group or, alternatively one or more lysine ε-amino groups are modified to provide an XTEN suitable as a reagent for conjugation to a target payload as it is considered to be stable. The resulting bis-arylhydrazones formed from aromatic hydrazines and aromatic aldehydes are stable to 92° C., and a wide range of pH values from 2.0-10.0 (Solulink, Inc., Protein-Protein Conjugation Kit, Technical Manual, Catalog #S-9010-1). The leaving group in the reaction is water and no reducing agents (e.g., sodium cyanoborohydride) are required to stabilize the bond. Molecules modified with either hydrazine/hydrazide or aldehyde moieties have good stability in aqueous environments and remain active without special handling requirements. The amino group(s) of the XTEN molecule are modified by NHS-ester/hydrazide, such as SANH (succinimidyl 4-hydrazinonicotinate acetone hydrazone), C6-SANH (C6-Succinimidyl 4-hydrazinonicotinate acetone hydrazone), SHTH (Succinimidyl 4-hydrazidoterephthalate hydrochloride). In a typical reaction, a protein is prepared as 1-5 mg/ml solution in modification buffer (100 mM Phosphate, 150 mM NaCl, pH 7.4) and the modifying agent is added in a 5- to 20-fold molar excess and the reaction is carried out for 2 hrs at room temperature. Separately, the payload molecule is modified with NHS-ester/aldehyde SFB (succinimidyl 4-formylbenzoate) or C6-SFB (C6-Succinimidyl 4-formylbenzoate) under similar conditions. Both modified molecules are then desalted into conjugation buffer (100 mM phosphate, 150 mM NaCl, pH 6.0). The resulting components are mixed together using 1 mole equivalent of a limiting protein and 1.5-2 mole equivalents of a protein that can be used in abundance. A catalyst buffer of 100 mM aniline in 100 mM phosphate, 150 mM NaCl, pH 6.0 is added to adjust the final concentration of aniline to 10 mM and the reaction is carried out for 2 hrs at room temperature.

[0353] In another embodiment, the XTEN-payload conjugate can be produced by reaction between an aldehyde and primary amino group followed by reduction of the formed Schiff base with sodium borohydride or cyanoborohydride. As a first step in the method, an XTEN molecule, such as XTEN with a primary α-amino group or Lys-containing XTEN with an ε-amino group, is modified by NHS-ester/aldehyde SFB (succinimidyl 4-formylbenzoate), C6-SFB (C6-succinimidyl 4-formylbenzoate) or SFPA (succinimidyl 4-formylphenoxyacetate) using typical amine-NHS chemistry in an amine-free coupling buffer such as 0.1M sodium phosphate, 0.15M NaCl, pH 7.2. The resulting modified aldehyde-XTEN can either be held at this point as an XTEN-cross-linker composition or can be used as a reagent to create an XTEN-payload conjugate. To make the XTEN-payload, the modified aldehyde-XTEN is mixed with a payload with a reactive amino-group and a mild reducing agent such as 20-100 mM sodium cyanoborohydride. The reaction mixture is incubated up to 6 hours at room temperature or overnight at 4° C. Unreacted aldehyde groups are then blocked with 50-500 mM Tris·HCl, pH 7.4 and 20-100 mM sodium cyanoborohydride, permitting separation of the conjugated purified XTEN-payload.

[0354] In other embodiments, the invention provides XTEN-payload conjugates comprising peptides or protein payloads wherein the payload is conjugated via chemical ligation based on the reactivity of the peptide/protein C-terminal acyl azide of the payload. As an example, when the peptide or protein is produced using solid-phase peptide synthesis (SPPS) with hydroxymethylbenzoic acid (HMBA) resin, the final peptide can be cleaved from the resin by a variety of nucleophilic reagents to give access to peptides with diverse C-terminal functionalities. In one embodiment, the method includes hydrazinolysis of the peptidyl/protein resins to yield peptide or protein hydrazides. Nitrosation of resulting acyl hydrazides with sodium nitrite or tert-butyl nitrite in dilute hydrochloric acid then results in formation of acyl azides. The resulting carbonyl azide (or acyl azide) is an activated carboxylate group (esters) that can react with a primary amine of an XTEN to form a stable amide bond, resulting in the XTEN-payload conjugate. In alternative embodiments, the primary amine could be the α-amine of the XTEN N-terminus or one or more ε-amine of engineered lysine residues in the XTEN sequence. In the conjugation reaction, the azide function is the leaving group, shown in FIG. 11. The conjugation reaction with the amine groups occurs by attack of the nucleophile at the electron-deficient carbonyl group (Meienhofer, J. (1979) The Peptides: Analysis, Synthesis, Biology. Vol. 1, Academic Press: N.Y.; ten Kortenaar P. B. W. et. al. Semisynthesis of horse heart cytochrome c analogues from two or three fragments. (1985) Proc. Nad. Acad Sci. USA 82, 8279-8283)

[0355] In yet other embodiments, the invention provides XTEN-cross-linker and XTEN-payload conjugates in which the conjugation is performed by orthogonal protein ligation in which an initial chemoselective capture is followed by an intramolecular acyl rearrangement, as shown in FIG. 12. The chemoselective capture requires a nucleophile or electrophile proximally placed at an N-terminal amine and another compatible electrophile or nucleophile also proximally located at a C-terminal carboxylic ester. In the embodiment, it is specifically contemplated that the XTEN can serve as either Protein1 or Protein2 in FIG. 12. Thus, in alternative embodiments, the XTEN can be reacted with appropriate reagents to produce the thioester on the C-terminus or introduce a cysteine on the N-terminus to produce alternative XTEN-cross-linker compositions. In using the foregoing XTEN-cross-linker conjugates to make the XTEN-payload, the chemoselective capture of the nucleophile and electrophile pair forming an ester or a thioester brings the N-terminal amino group and C-terminal ester of the respective reactants into such a close proximity to permit a spontaneous intramolecular acyl transfer to form an amide bond. Most orthogonal ligation reactions do not require protection of side-chain groups and take place under mild conditions that are compatible with biological environments (Tam J. P., Xu J., Eom K. D. Methods and strategies of peptide ligation. (2001) Biopolymers (Peptide Science) 60, 194-205).

[0356] In another embodiment, the conjugates can be created by a method reaction known as Native Chemical Ligation (NCL) involving a C-terminal thioester as an electrophile and N-terminal cysteine as a nucleophile. The result of this reaction is a native amide bond at the ligation site of the XTEN-payload conjugate (Dawson P. E., Muir T. W., Clark-Lewis I., Kent S. B. Synthesis of proteins by native chemical ligation. (1994) Science 266, 776-779; Tam J. P.; Lu Y.-A.; Liu C. F.; Shao, J. Peptide synthesis using unprotected peptides through orthogonal coupling methods. (1995) Proc. Nal. Acad. Sci. USA, 92, 12485-12489; Johnson, E. C. B.; Kent, S. B. H. J. Insights into the mechanism and catalysis of the native chemical ligation reaction. (2006) J. Am. Chem. Soc. 128, 6640-6646; Kent S. B. (2009) Total chemical synthesis of proteins. (2009) Chem. Soc. Rev. 38:338-351). The first amino acid of the C-terminal component in NCL reaction (shown as Protein2 in FIG. 12) is cysteine. Such a protein can be XTEN with cysteine in the first position or any other protein prepared by conventional recombinant protein biosynthesis, including a peptide/protein payload. The N-terminal component (shown as Payload in FIG. 13) is prepared as C-terminal thioester by chemical synthesis. Examples of thioester synthesis methods are known and available in the art, such as those described, for example, in Li X., Kawakami T., Aimoto S., Direct preparation of peptide thioesters using an Fmoc solid-phase method. (1998) Tetrahedron Lett., 39, 8660-8672); Ingenito R., Bianchi E., Fattori D., Pessi A. Solid-phase synthesis of peptide C-terminal thioesters by Fmoc/tBu chemistry. (1999) J. Am. Chem. Soc., 121, 11369-11374); Sewing A., Hilvert D. Fmoc-compatible solid-phase peptide synthesis of long C-terminal peptide thioesters. (2001) Angew. Chem. Int. Ed 40, 3395-3398; Brask J., Albericio F., Jensen K. J., Fmoc solid-phase synthesis of peptide thioesters by masking as trithioorthoesters. (2003) Org. Lett., 2003, 5, 2951-2953; Ollivier N., Behr J.-B., El-Mahdi O., Blanpain A., Melnyk O. Fmoc-solid-phase synthesis of peptide thioesters using an intramolecular N, S-acyl shift. (2005) Org. Lett., 7, 2647-2650. Usually, α-alkylthioesters are preferred because of ease of preparation and storage. However, because they are rather unreactive, the ligation reaction is catalyzed by in situ transthioesterification with thiol additives, with the most common thiol catalysts being 2-mercaptoethanesulfonate (MESNa) or 4-mercaptophenylacetic acid (MPAA). Chemical conjugation is typically complete in few hours and with high yields. While all 20 natural amino acids are suitable as the last residue of N-terminal component, the highest ligation rates were reported for glycine and histidine, making XTEN particularly suited for this reaction as the exemplary XTEN of Table 2 are nearly all glycine N-terminal polypeptides (Hackeng T. M. et al. Protein synthesis by native chemical ligation: expanded scope by using straightforward methodology. (1999) Proc. Natd. Acad. Sci. USA 96, 10068-10073). In other embodiments of this conjugation method, orthogonal ligation reactions include: (1)C-terminal thioacid with N-terminal BrAla or N-terminal aziridine (Tam J. P.; Lu Y.-A.; Liu C. F.; Shao, J. Peptide synthesis using unprotected peptides through orthogonal coupling methods. (1995) Proc. Natd. Acad Sci. USA, 92, 12485-12489); (2)C-terminal thioacid with N-terminal Cys-perthioester (Liu, C. F., Rao, C., Tam, J. P. (1996) Tetrahedron Lett., 37, 933-936); (3)C-terminal thioester with N-terminal Homocysteine (Tam J. P., Yu Q. Methionine ligation strategy in the biomimetic synthesis of parathyroid hormones. (1998) Biopolymers 46(5), 319-327); and (4)C-terminal thioacid and N-terminal His (Zhang L., Tam J. P. (1997) Tetrahedron. Lett. 38, 3-6). In the method, the preparation of C-terminal thioesters by chemical synthesis constrains the size of N-terminal component in NCL reaction. However, use of expressed protein ligation (EPL) methodology overcomes size limitations of peptide α-thioester imposed by the need of chemical synthesis (Muir T. W.; Sondhi D.; Cole P. A. Expressed protein ligation: a general method for protein engineering. (1998) Proc. Natd. Acad. Sci. USA 95, 6705-6710; Muir T. W. Semisynthesis of proteins by expressed protein ligation. (2003) Annu. Rev. Biochem. 72, 249-289). The EPL method is based on protein splicing, the process in which a protein undergoes an intramolecular rearrangement resulting in the extrusion of an internal sequence (intein) and the joining of the lateral sequences (exteins). The latter process involves a formation of ester or thioester intermediates. In practicing the invention, the commercially available Escherichia coli protein expression vectors allows one to produce proteins of interest, such as XTEN, expressed in frame fused with an intein-chitin binding domain (CBD) sequence. In the method, the fused protein undergoes an N-S shift when the side chain of the first cysteine residue of the intein portion of the precursor protein nucleophilically attacks the peptide bond of the residue immediately upstream (that is, for example, the final residue of XTEN) to form a linear thioester intermediate, as shown in FIG. 13. The chemical ligation step is initiated by incubating the protein with thiophenol (or other thiol catalysts such as MESNa and MPAA) and a cysteine-containing synthetic peptide or protein. This results in the in situ generation of a highly reactive phenyl α-thioester derivative of, for example, the XTEN protein that then rapidly ligates with the synthetic peptide/protein payload to result in the desired XTEN-payload conjugate. In another embodiment, an XTEN-thioester intermediate can be cleaved by 50 mM 2-mercaptoethanesulfonic acid (MESNa) in 20 mM Na-HEPES, pH 8.5, 50-1000 mM NaCl, and 1 mM EDTA (optional) and the resulting MESNa-tagged protein can be purified and stored −80° C. in 5 mM Bis Tris, pH 6.5, 250 mM NaCl until use as an XTEN-cross-linker conjugate for NCL reaction as the N-terminal component in the above described conjugation. The C-terminal component can be a payload with either a natural or synthetic peptide/protein with an N-terminal cysteine.

[0357] In yet other embodiments, the invention provides XTEN-cross-linker and XTEN-payload conjugates in which the conjugation between the XTEN and payload is performed by traceless Staudinger ligation, like Native Chemical Ligation (NCL), resulting in a native amide bond at the ligation site. In an advantage to the method, a cysteine is not required at the ligation juncture (Saxon, E.; Armstrong, C. R.; Bertozzi, C. R. A “traceless” Staudinger ligation for the chemoselective synthesis of amide bonds. (2000) Org. Lett. 2, 21412143; Nilsson, B. L.; Kiessling, L. L.; Raines, R. T. Staudinger ligation: a peptide from a thioester and azide. (2000) Org. Lett. 2, 1939-1941). Instead, an N-terminal Protein 1 is prepared as a C-terminal thioester using diphenylphosphinemethanethiol (see FIG. 14), while a C-terminal Protein 2 is prepared as an N-terminal azide that can be generated via a diazo-transfer reaction (Cavender C. J.; Shiner V. J., Jr. (1972) J. Org. Chem. 22, 3567-3569; Lundquist J. T., IV, Pelletier J. C. Improved solid-phase peptide synthesis method utilizing alpha-azide-protected amino acids. (2001) Org. Lett. 3, 781-783). A phosphine residue reacts with the azide of Protein2 to form an iminophosphorane after elimination of nitrogen (Staudinger reaction). The resulting iminophosphorane with its highly nucleophilic nitrogen atom can also be regarded as an aza-ylide. The nucleophilic nitrogen atom of the aza-ylide then attacks the carbonyl group of Protein1, cleaving the thioester. It is specifically intended that either XTEN or the payload can be either Protein1 or Protein2 in this reaction. Hydrolysis of the rearranged XTEN-payload product finally produces a native amide and liberates phosphine component as phosphine(V) oxide. Bis(p-dimethylaminoethylphenyl)phosphinomethanethiol, a water-soluble variant of diphenylphosphinemethanethiol, mediates the rapid ligation of equimolar substrates in water (Tam, A.; Soellner, M. B.; Raines, R. T. Water-soluble phosphinothiols for traceless Staudinger ligation and integration with Expressed Protein Ligation. (2007) J. Am. Chem. Soc., 129, 1142111-430).

[0358] In another embodiment, the invention provides XTEN-payload conjugates prepared by enzymatic ligation. Transglutaminases are enzymes that catalyze the formation of an isopeptide bond between the γ-carboxamide group of glutamine of a payload peptide or protein and the ε-amino group of a lysine in a lysine-engineered XTEN, thereby creating inter- or intramolecular cross-links between the XTEN and payload (see FIG. 15), resulting in the composition (Lorand L, Conrad S. M. Transglutaminases. (1984) Mol. Cell Biochem. 58(1-2), 9-35). Non-limiting examples of enzymes that have been successfully used for ligations are factor XIIIa (Schense J. C., Hubbell J. A. Cross-linking exogenous bifunctional peptides into fibrin gels with factor XIIIa. (1999) Bioconjug. Chem. 10(1):75-81) and tissue transglutaminase (Collier J. H., Messersmith P. B. Enzymatic modification of self-assembled peptide structures with tissue transglutaminase. (2003) Bioconjug. Chem. 14(4), 748-755; Davis N. E., Karfeld-Sulzer L. S., Ding S., Barron A. E. Synthesis and characterization of a new class of cationic protein polymers for multivalent display and biomaterial applications. (2009) Biomacromolecules 10 (5), 1125-1134). The glutamine substrate sequence GQQQL (SEQ ID NO: 575) is known to have high specificity toward tissue transglutaminase (Hu B. H., Messersmith P. B. Rational design of transglutaminase substrate peptides for rapid enzymatic formation of hydrogels. (2003) J. Am. Chem. Soc. 125(47), 14298-14299). Tissue transglutaminase sequence specificity was less stringent for an acyl acceptor (lysine) than for acyl donor (glutamine) (Greenberg C. S., Birckbichler P. J., Rice R. H. Transglutaminases: multifunctional cross-linking enzymes that stabilize tissues. (1991) FASEB J. 1991, 5, 3071-3077).

[0359] In an alternative embodiment of an enzymatically-created XTEN-payload composition, the sortase A transpeptidase enzyme from Staphylococcus aureus is used to catalyze the cleavage of a short 5-amino acid recognition sequence LPXTG (SEQ ID NO: 24) between the threonine and glycine residues of Protein1, and subsequently transfers the acyl-fragment to an N-terminal oligoglycine nucleophile of Protein1 (see FIG. 16). By functionalizing the Protein2 to contain the oligoglycine, it is possible to enzymatically conjugate the two proteins in a site-specific fashion to result in the desired XTEN-payload composition. The (poly)peptide bearing the sortase recognition site (LPXTG) (SEQ ID NO: 24) can be readily made using standard molecular biology cloning protocols. It is convenient to introduce glutamic acid in the X position of the recognition site, as this residue is commonly found in natural substrates of sortase A (Boekhorst J., de Been M. W., Kleerebezem M., Siezen R. J. Genome-wide detection and analysis of cell wall-bound proteins with LP×TG-like sorting motifs. (2005) J. Bacteriol. 187, 4928-4934). A high level of transacylation can be achieved by placing the sortase cleavage site both at the C-terminus of the substrate (Popp M. W., Antos J. M., Grotenbreg G. M., Spooner E., Ploegh H. L. Sortagging: A versatile method for protein labeling. (2007) Nat. Chem. Biol. 311, 707-708) and in flexible loops (Popp M. W., Artavanis-Tsakonas K., Ploegh H. L. Substrate filtering by the active-site crossover loop in UCHL3 revealed by sortagging and gain-of-function mutations. (2009) J. Biol. Chem. 284(6), 3593-3602). For proteins labeled at the C-terminus, it is important that the glycine in the minimal LPETG (SEQ ID NO: 576) tag is not placed at the C-terminus; it must be in a peptide linkage with at least one further C-terminal amino acid. In addition, better linkage is achieved by adding an extra glycine to the C-terminus of the cleavage site to yield LPETGG (SEQ ID NO: 577) (Pritz S., Wolf Y., Kraetke O., Klose J., Bienert M., Beyermann M. Synthesis of biologically active peptide nucleic acid-peptide conjugates by sortase-mediated ligation. (2007) J. Org. Chem. 72, 3909-3912; Tanaka T., Yamamoto T., Tsukiji S., Nagamune T. Site-specific protein modification on living cells catalyzed by sortase. (2008) Chembiochem 95, 802-807). Nucleophiles compatible with sortase-mediated transpeptidation have the single structural requirement of a stretch of glycine residues with a free amino terminus. Successful transpeptidation can be achieved with nucleophiles containing anywhere from one to five glycines; however, in a preferred embodiment, a maximum reaction rate is obtained when two or three glycines are present.

[0360] While the various embodiments of conjugation chemistry have been described in terms of protein-protein conjugations, it is specifically intended that in practicing the invention, the payload moiety of the XTEN-payload conjugates can be a small molecule drug in those conjugation methods applicable to functional groups like amines, sulfhydryls, carboxyl that are present in the target small molecule drugs. It will be understood by one of ordinary skill in the art that one can apply even more broad chemical techniques compared to protein and peptides whose functionalities are usually limited to amino, sulfhydryl and carboxyl groups. Drug payloads can be conjugated to the XTEN through functional groups including, but not limited to, primary amino groups, aminoxy, hydrazide, hydroxyl, thiol, thiolate, succinate (SUC), succinimidyl succinate (SS), succinimidyl propionate (SPA), succinimidyl butanoate (SBA), succinimidyl carboxymethylate (SCM), benzotriazole carbonate (BTC), N-hydroxysuccinimide (NHS), p-nitrophenyl carbonate (NPC). Other suitable reactive functional groups of drug molecule payloads include acetal, aldehydes (e.g., acetaldehyde, propionaldehyde, and butyraldehyde), aldehyde hydrate, alkenyl, acrylate, methacrylate, acrylamide, active sulfone, acid halide, isocyanate, isothiocyanate, maleimide, vinylsulfone, dithiopyridine, vinylpyridine, iodoacetamide, epoxide, glyoxal, dione, mesylate, tosylate, and tresylate.

[0361] In another embodiment, the drug payloads can also be conjugated to XTEN-cross-linker conjugates using a heterocycle ring system in which one or more ring atoms is a heteroatom, e.g. a nitrogen, an oxygen, a phosphorus or a sulfur atom. The heterocycle group comprises at least 1 to as many as 20 carbon atoms and 1 to 3 heteroatoms selected from N, O, P, and S. In the embodiment, the heterocycle may be a monocycle having 3 to 7 ring members (2 to 6 carbon atoms and 1 to 3 heteroatoms selected from N, O, P, and S) or a bicycle having 7 to 10 ring members (4 to 9 carbon atoms and 1 to 3 heteroatoms selected from N, O, P, and S), for example: a bicyclo [4,5], [5,5], [5,6], or [6,6] system. Heterocycles are described in Paquette, Leo A. “Principles of Modern Heterocyclic Chemistry”, W. A. Benjamin, New York, (1968); “The Chemistry of Heterocyclic Compounds, A series of Monographs” (John Wiley & Sons, New York, 1950 to present), in particular Volumes 13, 14, 16, 19, and 28. Non-limiting examples of heterocycles that may be found in drugs suitable for conjugation include pyridyl, dihydroypyridyl, tetrahydropyridyl (piperidyl), thiazolyl, tetrahydrothiophenyl, sulfur oxidized tetrahydrothiophenyl, pyrimidinyl, furanyl, thienyl, pyrrolyl, pyrazolyl, imidazolyl, tetrazolyl, benzofuranyl, thianaphthalenyl, indolyl, indolenyl, quinolinyl, isoquinolinyl, benzimidazolyl, piperidinyl, 4-piperidonyl, pyrrolidinyl, 2-pyrrolidonyl, pyrrolinyl, tetrahydrofuranyl, bis-tetrahydrofuranyl, tetrahydropyranyl, bis-tetrahydropyranyl, tetrahydroquinolinyl, tetrahydroisoquinolinyl, decahydroquinolinyl, octahydroisoquinolinyl, azocinyl, triazinyl, 6H-1,2,5-thiadiazinyl, 2H,6H-1,5,2-dithiazinyl, thienyl, thianthrenyl, pyranyl, isobenzofuranyl, chromenyl, xanthenyl, phenoxathinyl, 2H-pyrrolyl, isothiazolyl, isoxazolyl, pyrazinyl, pyridazinyl, indolizinyl, isoindolyl, 3H-indolyl, 1H-indazolyl, purinyl, 4H-quinolizinyl, phthalazinyl, naphthyridinyl, quinoxalinyl, quinazolinyl, cinnolinyl, pteridinyl, 4Ah-carbazolyl, carbazolyl, O-carbolinyl, phenanthridinyl, acridinyl, pyrimidinyl, phenanthrolinyl, phenazinyl, phenothiazinyl, furazanyl, phenoxazinyl, isochromanyl, chromanyl, imidazolidinyl, imidazolinyl, pyrazolidinyl, pyrazolinyl, piperazinyl, indolinyl, isoindolinyl, quinuclidinyl, morpholinyl, oxazolidinyl, benzotriazolyl, benzisoxazolyl, oxindolyl, benzoxazolinyl, and isatinoyl.

[0362] In some embodiments of the XTEN-payload conjugates with drugs as the payload, the drug molecules are attached to lysine- or cysteine engineered XTEN (such as the sequences of Table 3) by cross-linkers having two reactive sites for binding to the drug and the XTEN. Preferred cross-inker groups are those that are relatively stable to hydrolysis in the circulation, are biodegradable and are nontoxic when cleaved from the conjugate. In addition, the use of cross-linkers can provide the potential for conjugates with an even greater flexibility between the drug and the XTEN, or provide sufficient space between the drug and the XTEN such that the XTEN does not interfere with the binding between the pharmacophore and its binding site. In one embodiment, a cross-linker has a reactive site that has an electrophilic group that is reactive to a nucleophilic group present on an XTEN. Preferred nucleophiles include thiol, thiolate, and primary amine. The heteroatom of the nucleophilic group of a lysine- or cysteine-engineered XTEN is reactive to an electrophilic group on a cross-linker and forms a covalent bond to the cross-linker unit, resulting in an XTEN-cross-linker conjugate. Useful electrophilic groups for cross-linkers include, but are not limited to, maleimide and haloacetamide groups, and provide a convenient site for attachment to the XTEN. In another embodiment, a cross-linker has a reactive site that has a nucleophilic group that is reactive to an electrophilic group present on a drug such that a conjugation can occur between the XTEN-cross-linker and the payload drug, resulting in an XTEN-drug conjugate. Useful electrophilic groups on a drug include, but are not limited to, hydroxyl, thiol, aldehyde, alkene, alkane, azide and ketone carbonyl groups. The heteroatom of a nucleophilic group of a cross-linker can react with an electrophilic group on a drug and form a covalent bond. Useful nucleophilic groups on a cross-linker include, but are not limited to, hydrazide, oxime, amino, hydrazine, thiosemicarbazone, hydrazine carboxylate, and arylhydrazide. The electrophilic group on a drug provides a convenient site for attachment to a cross-inker.

[0363] In a particular embodiment, the conjugation of drugs to the lysine epsilon amino group of a subject lysine-engineered XTEN makes use of a reactive drug-N-hydroxylsuccinimide reactant, or esters such as drug-succinimidyl propionate, or drug-succinimidyl butanoate or other drug-succinimide conjugates. Alternatively, lysine residues of the subject lysine-engineered XTEN may be used to introduce free sulfhydryl groups through reaction with 2-iminothiolane. Alternatively, targeting substance lysines of subject lysine-engineered XTEN may be linked to a heterobifunctional reagent having a free hydrazide or aldehyde group available for conjugation with an active drug agent. Reactive esters can conjugate at physiological pH, but less reactive derivatives typically require higher pH values. Low temperatures may also be employed if a labile protein payload is being used. Under low temperature conditions, a longer reaction time may be used for the conjugation reaction.

[0364] In another particular embodiment, the invention provides XTEN-payload conjugates with an amino group conjugation with lysine residues of a subject lysine-engineered XTEN wherein the conjugation is facilitated by the difference between the pKa values of the α-amino group of the N-terminal amino acid (approximately 7.6 to 8.0) and pKa of the ε-amino group of lysine (approximately 10). Conjugation of the terminal amino group often employs reactive drug-aldehydes (such as drug-propionaldehyde or drug-butylaldehyde), which are more selective for amines and thus are less likely to react with, for example, the imidazole group of histidine. In addition, amino residues are reacted with succinic or other carboxylic acid anhydrides, or with N,N′-Disuccinimidyl carbonate (DSC), N,N′-carbonyl diimidazole (CDI), or p-nitrophenyl chloroformate to yield the activated succinimidyl carbonate, imidazole carbamate or p-nitrophenyl carbonate, respectively. Derivatization with these agents has the effect of reversing the charge of the lysinyl residues. Conjugation of a drug-aldehyde to the terminal amino group of a subject XTEN typically takes place in a suitable buffer performed at a pH which allows one to take advantage of the pKa differences between the ε-amino groups of the lysine residues and that of the α-amino group of the N-terminal residue of the protein. In the method of the embodiment, the reaction for coupling uses a pH in the range of from about pH 7 up to about 8. Useful methods for conjugation of the lysine epsilon amino group have been described in U.S. Pat. Nos. 4,904,584 and 6,048,720.

[0365] The person with ordinary skill in the art will be aware that the activation method and/or conjugation chemistry to be used in the creation of the XTEN-payload conjugates depends on the reactive groups of the XTEN polypeptide as well as the functional groups of the drug moiety (e.g., being amino, hydroxyl, carboxyl, aldehyde, sulfhydryl, alkene, alkane, azide, etc), the functional group of the drug-cross-linker reactant, or the functional group of the XTEN-cross-linker reactant. The drug conjugation may be directed towards conjugation to all available attachment groups on the engineered XTEN polypeptide such as the specific engineered attachment groups on the incorporated cysteine residues or lysine residues. In order to control the reactants such that the conjugation is directed to the appropriate reactive site, the invention contemplates the use of protective groups during the conjugation reaction. A “protecting group” is a moiety that prevents or blocks reaction of a particular chemically reactive functional group in a molecule under certain reaction conditions. The protecting group will vary depending upon the type of chemically reactive group being protected as well as the reaction conditions to be employed, as well as the presence of additional reactive groups in the molecule. Non-limiting examples of functional groups which may be protected include carboxylic acid groups, hydroxyl groups, amino groups, thiol groups, and carbonyl groups. Representative protecting groups for carboxylic acids and hydroxyls include esters (such as a p-methoxybenzyl ester), amides and hydrazides; for amino groups, carbamates (such as tert-butoxycarbonyl) and amides; for hydroxyl groups, ethers and esters; for thiol groups, thioethers and thioesters; for carbonyl groups, acetals and ketals; and the like. Such protecting groups are well-known to those skilled in the art and are described, for example, in T. W. Greene and G. M. Wuts, Protecting Groups in Organic Synthesis, Third Edition, Wiley, New York, 1999, and references cited therein. The conjugation may be achieved in one step or in a stepwise manner (e.g., as described in WO 99/55377), such as through addition of a reaction intermediate cross-linker, using the cross-linkers disclosed herein or those known in the art to be useful for conjugation to cysteine or lysine residues of polypeptides to be linked to reactive functional groups on drug molecules.

[0366] In some embodiments of the invention, the method for conjugating a cross-linker to a cysteine-engineered XTEN may provide that the XTEN is pre-treated with a reducing agent, such as dithiothreitol (DTT) to reduce any cysteine disulfide residues to form highly nucleophilic cysteine thiol groups (—CH₂SH). The reducing agent is subsequently removed by any conventional method, such as by desalting. The reduced XTEN thus reacts with drug-linker compounds, or cross-linker reagents, with electrophilic functional groups such as maleimide or α-halo carbonyl, according to, for example, the conjugation method of Klussman et al. (2004) Bioconjugate Chemistry 15(4), 765-773. Conjugation of a cross-linker or a drug to a cysteine residue typically takes place in a suitable buffer at pH 6-9 at temperatures varying from 4° C. to 25° C. for periods up to about 16 hours. Alternatively, the cysteine residues can be derivatized. Suitable derivatizing agents and methods are well known in the art. For example, cysteinyl residues most commonly are reacted with α-haloacetates (and corresponding amines), such as iodoacetic acid or iodoacetamide, to give carboxymethyl or carboxyamidomethyl derivatives. Cysteinyl residues also are derivatized by reaction with bromotrifluoroacetone, α-bromo-β-(4-imidozoyl)propionic acid, chloroacetyl phosphate, N-alkylmaleimides, 3-nitro-2-pyridyl disulfide, methyl 2-pyridyl disulfide, p-chloromercuribenzoate, 2-chloromercuri-4-nitrophenol, or chloro-7-nitrobenzo-2-oxa-1,3-diazole.

[0367] In some instances, the conjugation is performed under conditions aiming at reacting as many of the available XTEN attachment groups as possible with drug or drug-linker molecules. This is achieved by means of a suitable molar excess of the drug in relation to the polypeptide. Typical molar ratios of activated drug or drug-linker molecules to polypeptide are up to about 1000-1, such as up to about 200-1 or up to about 100-1. In some cases, the ratio may be somewhat lower, however, such as up to about 50-1, 10-1 or 5-1. Equimolar ratios also may be used.

[0368] In the embodiments, the XTEN-payload conjugates of the disclosure retain at least a portion of the pharmacologic activity compared to the corresponding payload not linked to XTEN. In one embodiment, the XTEN-payload retains at least about 1%, or at least about 5%, or at least about 10%, or at least about 20%, or at least about 30%, or at least about 40%, or at least about 50%, or at least about 60%, or at least about 70%, or at least about 80%, or at least about 90%, or at least about 95% of the pharmacologic activity of the payload not linked to XTEN.

[0369] In one embodiment, XTEN-payload conjugates can be designed to release the payload in the body by unspecific or enzymatic hydrolysis of the linker, including disulfide bond reduction, pH-dependent release, or by exogenous or endogenous proteases, including the proteases of Table 9. Macromolecules can be taken up by the cell either through receptor-mediated endocytosis, adsorptive endocytosis or fluid phase endocytosis (Jain R. K. Transport of molecules across tumor vasculature. (1987) Cancer Metastasis Rev. 6(4), 559-593; Jain R. K. Transport of molecules, particles, and cells in solid tumors. (1999) Ann. Rev. Biomed. Eng. 1, 241-263; Mukherjee S., Ghosh R. N., Maxfield F. R. Endocytosis. (1997) Physiol. Rev. 77(3), 759-803). Upon cellular uptake of XTEN-payload, the payload can be released by low pH values in endosomes (pH 5.0-6.5) and lysosomes (pH 4.5-5.0), as well as by lysosomal enzymes (e.g., esterases and proteases). Example of acid-sensitive cross-linker is 6-maleimidodocaproyl hydrazone which can be coupled to thiol-bearing carriers. The hydrazone linker is rapidly cleaved at pH values <5 allowing a release of the payload in the acidic pH of endosomes and lysosomes following internalization of the conjugate (Trail P. A. et al. Effect of linker variation on the stability, potency, and efficacy of carcinoma-reactive BR64-doxorubicin immunoconjugates. (1997) Cancer Res. 57(1), 100-105; Kratz F. et al. Acute and repeat-dose toxicity studies of the (6-maleimidocaproyl)hydrazone derivative of doxorubicin (DOXO-EMCH), an albumin-binding prodrug of the anticancer agent doxorubicin. (2007) Hum. Exp. Toxicol. 26(1), 19-35). Clinically approved mAb-drug conjugate, gemtuzumab ozogamicin (Mylotarg™) is a drug-antibody conjugate containing a humanized mAb P67.6 against CD33, linked chemically to the cytotoxic antibiotic agent calicheamicin. The linker between the antibody and the drug incorporates two labile bonds: a hydrazone and a sterically hindered disulfide. It has been shown that the acid-sensitive hydrazone bond is the actual cleavage site (Jaracz S., Chen J., Kuznetsova L. V., Ojima I. Recent advances in tumor-targeting anticancer drug conjugates. (2005) Bioorg. Med. Chem. 13(17), 5043-5054).

[0370] For those XTEN-payload conjugates in which the payload is linked by a disulfide bond, the payload can be released from XTEN by reduction of disulfide bond within the labile linker. For example, huN901-DM1 is a tumor-activated immunotherapeutic prodrug developed by ImmunoGen, Inc. for the treatment of small cell lung cancer. The prodrug consists of humanized anti-CD56 mAb (huN901) conjugated with microtubule inhibitor maytansinoid DM1. An average of 3.5-3.9 molecules of DM1 are bound to each antibody via hindered disulfide bonds. Although the disulfide link is stable in blood, it is cleaved rapidly on entering the cell targeted by huM901, thus releasing active DM1 (Smith S. V. Technology evaluation: huN901-DM1, ImmunoGen. (2005) Curr. Opin. Mol. Ther. 7(4), 394-401). DM1 has been also coupled to Millennium Pharmaceuticals MLN-591, an anti-prostate-specific membrane antigen mAb. DM1 is linked to the antibody via a hindered disulfide bond that provides serum stability at the same time as allowing intracellular drug release on internalization (Henry M. D. et al. A prostate-specific membrane antigen-targeted monoclonal antibody-chemotherapeutic conjugate designed for the treatment of prostate cancer. (2004) Cancer Res. 64(21), 7995-8001).

[0371] Release of the payload from the carrier XTEN can be achieved by creating compositions using short cleavable peptides as linkers between the payload and XTEN. Example of the conjugate assessed clinically is doxorubicin-HPMA (N-(2-hydroxypropyl)methacrylamide) conjugate in which doxorubicin is linked through its amino sugar to the HPMA copolymer via a tetrapeptide spacer GlyPheLeuGly (SEQ ID NO: 578) that is cleaved by lysosomal proteases, such as cathepsin B (Vasey P. A. et al. Phase I clinical and pharmacokinetic study of PK1 [N-(2-hydroxypropyl)methacrylamide copolymer doxorubicin]: first member of a new class of chemotherapeutic agents-drug-polymer conjugates. (1999) Clin. Cancer Res. 5(1), 83-94). Other examples of carrier-drug conjugates with peptide linkers that reached clinical stage of development are macromolecular platinum complexes. Two HPMA-based drug candidates consisted of a HPMA copolymer backbone to which the complexing aminomalonate platinum complexes were bound through cathepsin B-cleavable peptide spacer GlyPheLeuGly (SEQ ID NO: 578) or tripeptide spacer GlyGlyGly (Rademaker-Lakhai J. M. et al. A Phase I and pharmacological study of the platinum polymer AP5280 given as an intravenous infusion once every 3 weeks in patients with solid tumors. (2004) Clin. Cancer Res. 10(10), 3386-3395; Sood P. et al. Synthesis and characterization of AP5346, a novel polymer-linked diaminocyclohexyl platinum chemotherapeutic agent. (2006) Bioconjugate Chem. 17(5), 1270-1279).

[0372] A highly selective method was developed to target prostate cancer via prostate-specific antigen (PSA) protease which is almost exclusively expressed in prostate tissue and prostate carcinomas. A novel albumin-binding prodrug of paclitaxel, EMC-ArgSerSerTyrTyrSerLeu-PABC-paclitaxel (SEQ ID NO: 579) (EMC: ε-maleimidocaproyl; PABC: p-aminobenzyloxycarbonyl) was synthesized. This prodrug was water soluble and was bound to endogenous and exogenous albumin. Albumin-bound form of the prodrug was cleaved by PSA releasing the paclitaxel-dipeptide Ser-Leu-PABC-paclitaxel. Due to the incorporation of a PABC self-eliminating linker, this dipeptide was rapidly degraded to liberate paclitaxel as a final cleavage product (Elsadek B. et al. Development of a novel prodrug of paclitaxel that is cleaved by prostate-specific antigen: an in vitro and in vivo evaluation study. (2010) Eur. J. Cancer 46(18), 3434-3444).

[0373] Self-immolative spacers have gained significant interest due to their utility in prodrug delivery systems. Several reports described linear self-eliminating systems or dendrimeric structures which can release all of their units through a domino-like chain fragmentation, initiated by a single cleavage event (Haba K. et al. Single-triggered trimeric prodrugs. (2005) Angew. Chem., Int. Ed. 44, 716-720; Shabat D. Self-immolative dendrimers as novel drug delivery platforms. (2006) J. Polym. Sci., Part A: Polym. Chem. 44, 1569-1578. Warnecke A., Kratz F. 2,4-Bis(hydroxymethyl)aniline as a building block for oligomers with self-eliminating and multiple release properties. (2008) J. Org. Chem. 73, 1546-1552; Sagi A. et al. Self-immolative polymers. (2008) J. Am. Chem. Soc. 130, 5434-5435). In one study, a self-immolative dendritic prodrug with four molecules of the anticancer agent camptothecin and two molecules of PEG5000 was designed and synthesized. The prodrug was effectively activated by penicillin-G-amidase under physiological conditions and free camptothecin was released to the reaction media to cause cell-growth inhibition (Gopin A. et al. Enzymatic activation of second-generation dendritic prodrugs: conjugation of self-immolative dendrimers with poly(ethylene glycol) via click chemistr y. (2006) Bioconjugate Chem. 17, 1432-1440). Incorporation of a specific enzymatic substrate, cleaved by a protease that is overexpressed in tumor cells, could generate highly efficient cancer-cell-specific dendritic prodrug activation systems. Non-limiting examples of spacer sequences that are cleavable by proteases are listed in Table 9.

[0374] In some embodiments, the invention provides XTEN-payload configurations, including dimeric, trimeric, tetrameric and higher order conjugates in which the payload is attached to the XTEN using a labile linker as described herein, above. In one embodiment of the foregoing, the composition further includes a targeting component to deliver the composition to a ligand or receptor on a targeted cell. In another embodiment, the invention provides conjugates in which one, two, three, or four XTEN-payload compositions are conjugated with labile linkers to antibodies or antibody fragments, providing soluble compositions for use in targeted therapy of clinical indications such as, but not limited to, various treatment of tumors and other cancers wherein the antibody provides the targeting component and then, when internalized within the target cell, the labile linker permits the XTEN-payload to disassociate from the composition and effect the intended activity (e.g, cytotoxicity in a tumor cell). Hence, the inventive compositions are a type of immunoconjugate.

[0375] The unstructured characteristics and uniform composition and charge of XTEN result in properties that can be exploited for purification of XTEN-payload conjugates following a conjugation reaction. Of particular utility is the capture of XTEN conjugates by ion exchange, which allows the removal of un-reacted payload and payload derivatives. Of particular utility is the capture of conjugates by hydrophobic interaction chromatography (HIC). Due to their hydrophilic nature, most XTEN polypeptides show low binding to HIC resins, which facilitates the capture of XTEN-payload conjugates due to hydrophobic interactions between the payload and the column material, and their separation from un-conjugated XTEN that failed to conjugate to the payload during the conjugation process. The high purity of XTEN and XTEN-payload conjugates offers a significant benefit compared to most chemical or natural polymers, particularly pegylated payloads. Most chemical and natural polymers are produced by random- or semi-random polymerization, which results in the generation of many homologs. Such polymers can be fractionated by various methods to increase fraction of the target entity in the product. However, even after enrichment most preparations of natural polymers and their payload conjugates contain less than 10% target entity. Examples of PEG conjugates with G-CSF have been described in [Bagal, D., et al. (2008) Anal Chem, 80: 2408-18]. This publication shows that even a PEG conjugate that is approved for therapeutic use contains more than 100 homologs that occur with a concentration of at least 10% of the target entity.

[0376] The complexity of random polymers, such as PEG, is a significant impediment for the monitoring and quality control during conjugation and purification. In contrast, XTEN purified by the methods described herein have high levels of purity and uniformity. In addition, the conjugates created as described herein routinely contain greater than about 80%, 90%, 91%, 92%, 93%, 94%, 95%, 96%, 97%, 98%, or 99% of the intended target and in the intended configuration, resulting in easy to interpret mass spectra and chromatograms.

### 2. Monomeric XTEN-Cross-Linker, and XTEN-Payload Configurations

[0377] In another aspect, the invention provides XTEN-cross-linker conjugates and XTEN-payload conjugates with a single XTEN, wherein the conjugate is designed in different configurations. Exemplary configurations of such conjugates follow.

[0378] In one embodiment, the invention provides a conjugate having the configuration of formula IV:

[chemical structure]

wherein independently for each occurrence CL1 is a cross-linker; x is an integer from 1 to about 100, or 1 to about 50, or 1 to about 40, or 1 to about 20, or 1 to about 10, or 1 to about 5, or is 9, or is 3, or is 2, or is 1; and XTEN is a sequence having at least about 80%, or at least about 90%, or at least about 91%, or at least about 92%, or at least about 93%, or at least about 94%, or at least about 95%, or at least about 96%, or at least about 97%, or at least about 98%, or at least about 99%, or having 100% sequence identity to a sequence selected from the group of sequences set forth in Tables 2 and 3. In one embodiment of the conjugate of formula IV, CL1 is a cross-linker selected from Table 13. In another embodiment of the conjugate of formula IV, x has the foregoing ranges and a cross-linker of Table 13 is linked to each cysteine sulfur of the XTEN. In another embodiment of the conjugate of formula IV, x has the foregoing ranges and a cross-linker is linked to a each lysine epsilon amino group of the XTEN. In another embodiment of the conjugate of formula IV, x is 1 and a cross-linker of Table 13 is linked to the N-terminal amino group of the XTEN. It will be understood by one of skill in the art that the compositions of the foregoing embodiments comprising the cross-linker conjugated to an XTEN using the specified components represents the reaction product of the individual reactants and thus differs from the precise composition of the reactants. In another embodiment, the invention provides a preparation of the conjugate of formula IV in which at least about 80%, or at least about 90%, or at least about 91%, or at least about 92%, or at least about 93%, or at least about 94%, or at least about 95% of the XTEN molecules of the preparation of the conjugate have identical sequence length.

[0379] In another embodiment, the invention provides a conjugate having the configuration of formula V:

[chemical structure]

wherein independently for each occurrence CL₁ is a cross-linker; x is an integer from 1 to about 100, or 1 to about 50, or 1 to about 40, or 1 to about 20, or 1 to about 10, or 1 to about 5, or is 9, or is 3, or is 2, or is 1; CL₂ is a cross-linker that is different from CL₁; y is an integer from 1 to about 100, or 1 to about 50, or 1 to about 40, or 1 to about 20, or 1 to about 10, or 1 to about 5, or is 9, or is 3, or is 2, or is 1, with the proviso that x+y is ≥2; and XTEN is a sequence having at least about 80%, or at least about 90%, or at least about 91%, or at least about 92%, or at least about 93%, or at least about 94%, or at least about 95%, or at least about 96%, or at least about 97%, or at least about 98%, or at least about 99%, or having 100% sequence identity to a sequence selected from the group of sequences set forth in Tables 2 and 3. In one embodiment of the conjugate of formula V, CL₁ and CL₂ are each selected from the group of cross-linkers set forth in Table 13. In one embodiment of the conjugate of formula V, x has the foregoing ranges and each CL₁ is linked to an epsilon amino group of each lysine of the XTEN and y has the foregoing ranges and each CL₂ is linked to a sulfur group of each cysteine of the XTEN. In another embodiment of the conjugate of formula V, x is 1 and CL₁ is linked to the N-terminal amino group of the XTEN and each CL₂ is linked to a cysteine sulfur group of the XTEN. It will be understood by one of skill in the art that the compositions of the foregoing embodiments comprising the cross-linker conjugated to an XTEN using the specified components represents the reaction product of the reactants and thus differs from the precise composition of the reactants. In another embodiment, the invention provides a preparation of the conjugate of formula V in which at least about 80%, or at least about 90%, or at least about 91%, or at least about 92%, or at least about 93%, or at least about 94%, or at least about 95% of the XTEN molecules of the preparation of the conjugate have identical sequence length.

[0380] In another aspect, the invention provides XTEN-payload conjugates having defined configurations. The invention takes advantage of the reactive XTEN-cross-linker conjugation partner compositions described herein to which reactive molecules of payloads can be joined by chemical reaction.

[0381] In one embodiment, the invention provides a conjugate having the configuration of formula VI:

[chemical structure]

wherein independently for each occurrence P_{R1} is a single atom residue of a payload, wherein the residue is selected from the group consisting of carbon, nitrogen, oxygen and sulfur; CL₁ is a cross-linker; x is an integer from 1 to about 100, or 1 to about 50, or 1 to about 40, or 1 to about 20, or 1 to about 10, or 1 to about 5, or is 3, or is 2, or is 1; and XTEN is a sequence having at least about 80%, or at least about 90%, or at least about 91%, or at least about 92%, or at least about 93%, or at least about 94%, or at least about 95%, or at least about 96%, or at least about 97%, or at least about 98%, or at least about 99%, or having 100% sequence identity to a sequence selected from the group of sequences set forth in Tables 2 and 3. In one embodiment of the conjugate of formula VI, the single atom residue of a payload is from a payload selected from the group consisting of the payloads set forth in Tables 11, 12, 18, 19, and 21. In one embodiment of the conjugate of formula VI, CL₁ is a cross-linker selected from Table 13. In one embodiment of the conjugate of formula VI, each cross-linker is linked to a cysteine sulfur of the XTEN. In another embodiment of the conjugate of formula VI, each cross-linker is linked to an lysine epsilon amino group of the XTEN. In another embodiment of the conjugate of formula VI, x is 1 and the cross-linker is linked to the N-terminal amino group of the XTEN. In another embodiment of the conjugate of formula VI, CL₁ is the reaction product of a first and a second click chemistry reactant selected from Table 15. In another embodiment, the invention provides a preparation of the conjugate of formula VI in which at least about 80%, or at least about 90%, or at least about 91%, or at least about 92%, or at least about 93%, or at least about 94%, or at least about 95% of the XTEN molecules of the preparation of the conjugate have identical sequence length.

[0382] In another embodiment, the invention provides a conjugate having the configuration of formula VII:

[chemical structure]

wherein independently for each occurrence: P₁ is a payload selected from the group consisting of the payloads set forth in Tables 11, 12, 18, 19, and 21; CL₁ is a cross-linker; x is an integer from 1 to about 100, or 1 to about 50, or 1 to about 40, or 1 to about 20, or 1 to about 10, or 1 to about 5, or is 9, or is 3, or is 2, or is 1; and XTEN is a sequence having at least about 80%, or at least about 90%, or at least about 91%, or at least about 92%, or at least about 93%, or at least about 94%, or at least about 95%, or at least about 96%, or at least about 97%, or at least about 98%, or at least about 99%, or having 100% sequence identity to a sequence selected from the group of sequences set forth in Tables 2 and 3. In one embodiment of the conjugate of formula VII, CL₁ is a cross-linker selected from Table 13. In one embodiment of the conjugate of formula VII, each cross-linker is linked to a cysteine sulfur of the XTEN. In another embodiment of the conjugate of formula VII, each cross-linker is linked to an lysine epsilon amino group of the XTEN. In another embodiment of the conjugate of formula VII, x is 1 and the cross-linker is linked to the N-terminal amino group of the XTEN. In one embodiment, the conjugate of formula VII is selected from the group consisting of the conjugates set forth in Table 21. In another embodiment of the conjugate of formula VII, CL₁ is the reaction product of a first and a second click chemistry reactant selected from Table 15. It will be understood by one of skill in the art that the compositions of the foregoing embodiments comprising the payload conjugated to an XTEN-cross-linker using the specified components represents the reaction product of the reactants and thus differs from the precise composition of the reactants. In another embodiment, the invention provides a preparation of the conjugate of formula VII in which at least about 80%, or at least about 90%, or at least about 91%, or at least about 92%, or at least about 93%, or at least about 94%, or at least about 95% of the XTEN molecules of the preparation of the conjugate have identical sequence length.

[0383] In another embodiment, the invention provides a conjugate having the configuration of formula VIII:

[chemical structure]

wherein independently for each occurrence P_{R1} is a single atom residue of a payload, wherein the residue is selected from the group consisting of carbon, nitrogen, oxygen and sulfur; P_{R2} is a single atom residue of a payload, wherein the residue is selected from the group consisting of carbon, nitrogen, oxygen and sulfur; CL₁ is a cross-linker; x is an integer from 1 to about 100, or 1 to about 50, or 1 to about 40, or 1 to about 20, or 1 to about 10, or 1 to about 5, or is 9, or is 3, or is 2, or is 1; CL₂ is a cross-linker that is different from CL₁; y is an integer from 1 to about 100, or 1 to about 50, or 1 to about 40, or 1 to about 20, or 1 to about 10, or 1 to about 5, or is 9, or is 3, or is 2, or is 1, with the proviso that x+y is ≥2; and XTEN is a sequence having at least about 80%, or at least about 90%, or at least about 91%, or at least about 92%, or at least about 93%, or at least about 94%, or at least about 95%, or at least about 96%, or at least about 97%, or at least about 98%, or at least about 99%, or having 100% sequence identity to a sequence selected from the group of sequences set forth in Tables 2 and 3. In one embodiment of the conjugate of formula VIII, the single atom residue of a payload is from a payload selected from the group consisting of the payloads set forth in Tables 11, 12, 18, 19, and 21. In one embodiment of the conjugate of formula VIII, CL₁ and CL₂ are each selected from the group of cross-linkers set forth in Table 13. In one embodiment of the conjugate of formula VIII, each CL₁ is linked to an lysine epsilon amino group of the XTEN and each CL₂ is linked to a cysteine sulfur of the XTEN. In another embodiment of the conjugate of formula VIII, x is 1 and CL₁ is linked to the N-terminal amino group of the XTEN and CL₂ is linked to either a cysteine sulfur or an lysine epsilon amino group of the XTEN. In another embodiment of the conjugate of formula VIII, CL₁ is the reaction product of a first and a second click chemistry reactant selected from Table 15. In another embodiment of the conjugate of formula VIII, C₂ is the reaction product of a first and a second click chemistry reactant selected from Table 15. In another embodiment, the invention provides a preparation of the conjugate of formula VIII in which at least about 80%, or at least about 90%, or at least about 91%, or at least about 92%, or at least about 93%, or at least about 94%, or at least about 95% of the XTEN molecules of the preparation of the conjugate have identical sequence length.

[0384] In another embodiment, the invention provides a conjugate having the configuration of formula IX:

[chemical structure]

wherein independently for each occurrence P₁ is a payload selected from the group consisting of the payloads set forth in Tables 11, 12, 18, 19, and 21; P₂ is a payload selected from the group consisting of the payloads set forth in Tables 11, 12, 18, 19, and 21 and that is different from P₁; CL₁ is a cross-linker; x is an integer from 1 to about 100, or 1 to about 50, or 1 to about 40, or 1 to about 20, or 1 to about 10, or 1 to about 5, or is 9, or is 3, or is 2, or is 1; CL₂ is a cross-linker that is different from CL₁; y is an integer from 1 to about 100, or 1 to about 50, or 1 to about 40, or 1 to about 20, or 1 to about 10, or 1 to about 5, or is 9, or is 3, or is 2, or is 1, with the proviso that x+y is ≥2; and XTEN is a sequence having at least about 80% b, or at least about 90%, or at least about 91%, or at least about 92%, or at least about 93%, or at least about 94%, or at least about 95%, or at least about 96%, or at least about 97%, or at least about 98%, or at least about 99%, or having 100% sequence identity to a sequence selected from the group of sequences set forth in Tables 2 and 3. In one embodiment of the conjugate of formula IX, the single atom residue of a payload is from a payload selected from the group consisting of the payloads set forth in Tables 11, 12, 18, 19, and 21. In one embodiment of the conjugate of formula IX, CL₁ and CL₂ are each selected from the group of cross-linkers set forth in Table 13. In one embodiment of the conjugate of formula IX, each CL₁ is linked to an lysine epsilon amino group of the XTEN and each CL₂ is linked to a cysteine sulfur of the XTEN. In another embodiment of the conjugate of formula IX, x is 1 and CL₁ is linked to the N-terminal amino group of the XTEN and CL₂ is linked to either a cysteine sulfur or an lysine epsilon amino group of the XTEN. In another embodiment of the conjugate of formula IX, CL₁ is the reaction product of a first and a second click chemistry reactant selected from Table 15. In another embodiment of the conjugate of formula IX, C₂ is the reaction product of a first and a second click chemistry reactant selected from Table 15. In one embodiment, the conjugate of formula IX is selected from the group consisting of the conjugates set forth in Table 21. In another embodiment, the invention provides a preparation of the conjugate of formula IX in which at least about 80%, or at least about 90%, or at least about 91%, or at least about 92%, or at least about 93%, or at least about 94%, or at least about 95% of the XTEN molecules of the preparation of the conjugate have identical sequence length.

### 3. Dimeric, Trimeric, Tetrameric, and Multimeric Configurations of XTEN-Cross-Linkers and XTEN-Payload Conjugates

[0385] In one aspect, the invention provides conjugates wherein different numbers of XTEN or XTEN-payload conjugation partners are joined by linkers in a numerically-defined configuration; e.g., dimeric, trimeric, tetrameric, or multimeric. As used herein, “precursor” is intended to include components used as reactants in a conjugation reaction leading to an intermediate or final composition, and includes but is not limited to XTEN segments of any length (including the XTEN of Tables 2 and 3 or as depicted in the various formulae, above), XTEN-crosslinkers, XTEN-payload-crosslinker segments, payloads with reactive groups, linkers, and other such components described herein.

[0386] In some embodiments, the invention provides conjugates in which two XTEN or XTEN-payload precursor segments are linked by a divalent cross-linker, resulting in a divalent configuration, such as shown in FIG. 19C and FIG. 27B. In one embodiment of the divalent XTEN-payload conjugate, each XTEN-payload can be a monomeric fusion protein comprising a biologically active peptide or polypeptide, wherein each fusion protein precursor segment is linked to the divalent linker by the alpha-amino group of the N-terminus, resulting in the divalent conjugate. In another embodiment of the divalent XTEN-payload conjugate, each XTEN-payload precursor segment is a monomeric fusion protein comprising a biologically active peptide or polypeptide, wherein each fusion protein is linked to the divalent linker at the C-terminus, resulting in the divalent conjugate. In another embodiment of the divalent XTEN-payload conjugate, each XTEN comprises one or more payloads (that can be a peptide, polypeptide or a drug) conjugated to the XTEN, wherein each XTEN precursor is linked to the other XTEN precursor comprising one or more second, different payload molecules by a divalent linker at the N-terminus, resulting in the divalent conjugate. In another embodiment of the divalent XTEN-payload conjugate, each XTEN comprises one or more payloads (that can be a peptide, polypeptide or a drug) conjugated to the XTEN, wherein each XTEN precursor is linked to the other XTEN precursor comprising one or more second, different payload molecules by a divalent linker by the carboxyl group or a modified group at the C-terminus (including, but not limited to XTEN modified by insertion of a cysteine at the C-terminus), resulting in the divalent conjugate. In the foregoing embodiments of the paragraph, as would be appreciated by one of ordinary skill in the art in light of the present disclosure, there are different approaches to create the precursors to be linked, such as conjugating a linker to a first precursor XTEN-payload and then effecting a second reaction to join the precursor to the reactive group of the terminus the second XTEN-payload precursor. Alternatively, one or both of the XTEN termini can be modified as precursors that can then be joined by click chemistry or by other methods described or illustrated herein, leaving few or no residual atoms to bridge the intersection of the XTEN. In another embodiment, two XTEN-payload precursor sequences are linked by a disulfide bridge using cysteines or thiol groups introduced at or near the termini of the precursor XTEN-payload reactants, resulting in a divalent XTEN-payload conjugate. Exemplary configurations of such divalent conjugates follow.

[0387] In one embodiment, the invention provides a conjugate having the configuration of formula X

[chemical structure]

wherein independently for each occurrence P_{R1} is a single atom residue of a first payload wherein the residue is selected from the group consisting of carbon, nitrogen, oxygen and sulfur; P_{R2} is a single atom residue of a second payload wherein the residue is selected from the group consisting of carbon, nitrogen, oxygen and sulfur; CL₁ is a cross-linker; x is an integer from 1 to about 100, or 1 to about 50, or 1 to about 40, or 1 to about 20, or 1 to about 10, or 1 to about 5, or is 9, or is 3, or is 2, or is 1; CL₂ is a cross-linker that is different from CL₁; y is an integer from 1 to about 100, or 1 to about 50, or 1 to about 40, or 1 to about 20, or 1 to about 10, or 1 to about 5, or is 9, or is 3, or is 2, or is 1, with the proviso that x+y is ≥2; 2×CL is alternatively a divalent cross-linker or the reaction product of a first and a second click chemistry reactant selected from Table 15; XTEN₁ is a polypeptide having at least 80%, or at least about 90%, or at least about 91%, or at least about 92%, or at least about 93%, or at least about 94%, or at least about 95%, or at least about 96%, or at least about 97%, or at least about 98%, or at least about 99%, or having 100% sequence identity to a sequence selected from the group of sequences set forth in Tables 2 and 3; and XTEN₂ is a polypeptide having at least 80%, or at least about 90%, or at least about 91%, or at least about 92%, or at least about 93%, or at least about 94%, or at least about 95%, or at least about 96%, or at least about 97%, or at least about 98%, or at least about 99%, or having 100% sequence identity to a sequence selected from the group of sequences set forth in Tables 2 and 3. In one embodiment of the conjugate of formula X, CL₁ and CL₂ are each selected from the group of cross-linkers set forth in Table 13. In another embodiment of the conjugate of formula X, x is 1 and CL₁ is linked to the N-terminal amino group of the XTEN. In another embodiment of the conjugate of formula X, CL₁ is the reaction product of a first and a second click chemistry reactant selected from Table 15. In another embodiment of the conjugate of formula X, C₂ is the reaction product of a first and a second click chemistry reactant selected from Table 15. In another embodiment of the conjugate of formula X, each CL₁ is linked to a cysteine sulfur of the XTEN₁ and each CL₂ is linked to a cysteine sulfur of XTEN₂. In another embodiment of the conjugate of formula X, each CL₁ is linked to a lysine epsilon amino group of the XTEN₁ and each CL₂ is linked to a lysine epsilon amino group of the XTEN₂. In another embodiment of the conjugate of formula X, each CL₁ is linked to a cysteine sulfur of the XTEN₁ and each CL₂ is linked to a lysine epsilon amino group of the XTEN₂. In another embodiment of the conjugate of formula X, XTEN₁ and XTEN₂ are identical. In another embodiment of the conjugate of formula X, XTEN₁ and XTEN₂ are different. In another embodiment, the invention provides a preparation of the conjugate of formula X in which at least about 80%, or at least about 90%, or at least about 91%, or at least about 92%, or at least about 93%, or at least about 94%, or at least about 95% of the XTEN molecules of the preparation of the conjugate have identical sequence length.

[0388] In another embodiment, the invention provides a conjugate having the configuration of formula XI

[chemical structure]

wherein independently for each occurrence P₁ is a first payload selected from the group of payloads set forth in Tables 11, 12, 18, 19, and 21; P₂ is a second payload selected from the group of payloads set forth in Tables 11, 12, 18, 19, and 21 and that is different from P₁; CL₁ is a cross-linker; x is an integer from 1 to about 100, or 1 to about 50, or 1 to about 40, or 1 to about 20, or 1 to about 10, or 1 to about 5, or is 9, or is 3, or is 2, or is 1; CL₂ is a cross-linker that is different from CL₁; y is an integer from 1 to about 100, or 1 to about 50, or 1 to about 40, or 1 to about 20, or 1 to about 10, or 1 to about 5, or is 9, or is 3, or is 2, or is 1, with the proviso that x+y is ≥2; 2×CL is alternatively a divalent cross-linker or the reaction product of a first and a second click chemistry reactant selected from Table 15; XTEN₁ is a first substantially homogeneous XTEN having at least 80%, or at least about 90%, or at least about 91%, or at least about 92%, or at least about 93%, or at least about 94%, or at least about 95%, or at least about 96%, or at least about 97%, or at least about 98%, or at least about 99%, or having 100% sequence identity to a sequence selected from the group of sequences set forth in Tables 2 and 3; and XTEN₂ is a first substantially homogeneous having at least 80%, or at least about 90%, or at least about 91%, or at least about 92%, or at least about 93%, or at least about 94%, or at least about 95%, or at least about 96%, or at least about 97%, or at least about 98%, or at least about 99%, or having 100% sequence identity to a sequence selected from the group of sequences set forth in Tables 2 and 3. In one embodiment of the conjugate of formula XI, CL₁ and CL₂ are each selected from the group of cross-linkers set forth in Table 13. In another embodiment of the conjugate of formula XI, x is 1 and CL₁ is linked to the N-terminal amino group of the XTEN. In another embodiment of the conjugate of formula XI, CL₁ is the reaction product of a first and a second click chemistry reactant selected from Table 15. In another embodiment of the conjugate of formula XI, C₂ is the reaction product of a first and a second click chemistry reactant selected from Table 15. In another embodiment of the conjugate of formula XI, each CL₁ is linked to a cysteine sulfur of the XTEN, and each CL₂ is linked to a cysteine sulfur of XTEN₂. In another embodiment of the conjugate of formula XI, each CL₁ is linked to a lysine epsilon amino group of the XTEN, and each CL₂ is linked to a lysine epsilon amino group of the XTEN₂. In another embodiment of the conjugate of formula XI, each CL₁ is linked to a cysteine sulfur of the XTEN, and each CL₂ is linked to a lysine epsilon amino group of the XTEN₂. In another embodiment of the conjugate of formula XI, XTEN₁ and XTEN₂ are identical. In another embodiment of the conjugate of formula XI, XTEN₁ and XTEN₂ are different. In one embodiment, the conjugate of formula XI is selected from the group consisting of the conjugates set forth in Table 21. In another embodiment, the invention provides a preparation of the conjugate of formula XI in which at least about 80%, or at least about 90%, or at least about 91%, or at least about 92%, or at least about 93%, or at least about 94%, or at least about 95% of the respective XTEN₁ and XTEN₂ molecules of the preparation of the conjugate have identical sequence length.

[0389] In other embodiments, the invention provides XTEN-linker and XTEN-linker payload conjugates with a trimeric configuration, such as shown in FIGS. 21-23.

[0390] The invention provides trimeric conjugates in which three XTEN-cross-linker conjugates are linked by a trivalent linker, resulting in a trimeric XTEN-cross-linker configuration. In one embodiment, the invention provides a trimeric XTEN-crosslinker having the configuration of formula XII

[chemical structure]

wherein independently for each occurrence 3×CL is the trivalent cross-linker, CL1 is the first cross-linker conjugated to XTEN1, CL2 is the second cross-linker conjugated to XTEN2, CL3 is the third cross-linker conjugated to XTEN3, x is an integer of 1 to about 10, y is an integer of 1 to about 10, z is an integer of 1 to about 10 with the proviso that x+y+z is ≥3, XTEN₁ is the first XTEN having at least 80%, or at least about 90%, or at least about 91%, or at least about 92%, or at least about 93%, or at least about 94%, or at least about 95%, or at least about 96%, or at least about 97%, or at least about 98%, or at least about 99%, or having 100% sequence identity to a sequence selected from the group of sequences set forth in Tables 2 and 3; XTEN₂ is the second XTEN having at least 80%, or at least about 90%, or at least about 91%, or at least about 92%, or at least about 93%, or at least about 94%, or at least about 95%, or at least about 96%, or at least about 97%, or at least about 98%, or at least about 99%, or having 100% sequence identity to a sequence selected from the group of sequences set forth in Tables 2 and 3; and XTEN₃ is the third XTEN having at least 80%, or at least about 90%, or at least about 91%, or at least about 92%, or at least about 93%, or at least about 94%, or at least about 950%, or at least about 96%, or at least about 97%, or at least about 98%, or at least about 99%, or having 100% sequence identity to a sequence selected from the group of sequences set forth in Tables 2 and 3 wherein XTEN₁, XTEN₂, and XTEN₃ are the same or are different XTEN sequences. In one embodiment of the conjugate of formula XII, CL1, CL2, and CL3 are each selected from the group consisting of the cross-linkers set forth in Table 13, and are the same or are different. In one embodiment, the conjugate of formula XII further comprises a single atom residue of a first payload conjugated to each cross-linker of the first substantially homogeneous XTEN wherein the residue is selected from the group consisting of carbon, nitrogen, oxygen and sulfur, a single atom residue of a second payload conjugated to each cross-linker of the second substantially homogeneous XTEN wherein the residue is selected from the group consisting of carbon, nitrogen, oxygen and sulfur, and a single atom residue of a third payload conjugated to each cross-linker of the third substantially homogeneous XTEN wherein the residue is selected from the group consisting of carbon, nitrogen, oxygen and sulfur.

[0391] In another embodiment, the invention provides trimeric conjugates in which three XTEN-payload precursors are linked by a trivalent linker, resulting in a trimeric XTEN-payload configuration, such as shown in FIGS. 21 and 97-106. In one embodiment, the invention provides a trimeric XTEN-crosslinker having the configuration of formula XIII

[chemical structure]

wherein independently for each occurrence 3×CL is the trivalent cross-linker is selected from the group of trivalent cross-linkers set forth in Tables 13 and 14; P₁ is conjugated to each cross-linker of the first XTEN and is selected from the group consisting of the payloads set forth in Tables 11, 12, 18 and 21, P2 is a second payload conjugated to each cross-linker of the second XTEN and is selected from the group consisting of the payloads set forth in Tables 11, 12, 18 and 21, wherein the payload is the same or is different from the first payload, and P₃ is a third payload conjugated to each cross-linker of the third XTEN and is selected from the group consisting of the payloads set forth in Tables 11, 12, 18 and 21, wherein the payload is the same or is different from the first or the second payload; CL₁ is the first cross-linker, x is an integer from 1 to about 100, or 1 to about 50, or 1 to about 40, or 1 to about 20, or 1 to about 10, or 1 to about 5, or is 9, or is 3, or is 2, or is 1; CL2 is a second cross-linker, y is an integer from 1 to about 100, or 1 to about 50, or 1 to about 40, or 1 to about 20, or 1 to about 10, or 1 to about 5, or is 9, or is 3, or is 2, or is 1; and z is an integer from 1 to about 100, or 1 to about 50, or 1 to about 40, or 1 to about 20, or 1 to about 10, or 1 to about 5, or is 9, or is 3, or is 2, or is 1, with the proviso that x+y+z is ≥3; XTEN₁ is the first XTEN having at least 80%, or at least about 90%, or at least about 91%, or at least about 92%, or at least about 93%, or at least about 94%, or at least about 95%, or at least about 96%, or at least about 97%, or at least about 98%, or at least about 99%, or having 100% sequence identity to a sequence selected from the group of sequences set forth in Tables 2 and 3; XTEN₂ is the second XTEN having at least 80%, or at least about 90%, or at least about 91%, or at least about 92%, or at least about 93%, or at least about 94%, or at least about 95%. or at least about 96%, or at least about 97%, or at least about 98%, or at least about 99%, or having 100% sequence identity to a sequence selected from the group of sequences set forth in Tables 2 and 3; and XTEN₃ is the third XTEN having at least 80%, or at least about 90%, or at least about 91%, or at least about 92%, or at least about 93%, or at least about 94%, or at least about 95%, or at least about 96%, or at least about 97%, or at least about 98%, or at least about 99%, or having 100% sequence identity to a sequence selected from the group of sequences set forth in Tables 2 and 3 wherein XTEN₁, XTEN₂, and XTEN₃ are the same or are different XTEN sequences. In some embodiments, the conjugate of formula XIII further comprises a first payload wherein the payload is a targeting moiety with specific binding affinity to a target, wherein the targeting moiety is selected from the group consisting of the targeting moieties set forth in Tables 17-19 and 21, and at least one other of the payloads is a drug wherein the drug is selected from the group consisting of the drugs set forth in Table 11, Table 19, and Table 21. In one embodiment of the foregoing, the targeting moiety is LHRH or folate and the drug is selected from doxorubicin, paclitaxel, auristatin, monomethyl auristatin E (MMAE), monomethyl auristatin F, maytansine, dolastatin, calicheamicin, vinca alkaloid, camptothecin, mitomycin C, epothilone, hTNF, Il-12, bortezomib, ranpirnase, pseudomonas exotoxin, SN-38, and rachelmycin. In another embodiment of the trimeric XTEN conjugate composition, the composition has the configuration of formula XIV:

[chemical structure]

wherein independently for each occurrence; 3×CL is the trivalent cross-linker, CL1 is the first cross-linker conjugated to XTEN₁; CL2 is the second cross-linker conjugated to XTEN₂; x is an integer of 1 to about 10; y is an integer of 1 to about 10 with the proviso that x+y is ≥2; XTEN₁ is the first XTEN; XTEN₂ is the second XTEN; and XTEN₃ is the third XTEN wherein the XTEN is selected from the group consisting of the sequences set forth in Table 2. In one embodiment of the trimeric XTEN conjugate composition of formula XIV, the composition further comprises a single atom residue of a first payload conjugated to each first cross-linker of the first XTEN wherein the residue is selected from the group consisting of carbon, nitrogen, oxygen and sulfur; and a single atom residue of a second payload conjugated to each second cross-linker of the second XTEN wherein the residue is selected from the group consisting of carbon, nitrogen. oxygen and sulfur. In another embodiment of the trimeric XTEN conjugate composition of formula XIV, the composition further comprises a first payload conjugated to each first cross-linker of the first XTEN selected from the group consisting of the payloads set forth in Tables 6, 7, 18 and 21; and a second payload conjugated to each second cross-linker of the second XTEN selected from the group consisting of the payloads set forth in Tables 6, 7, 18 and 21, wherein the payload is the same or is different from the first payload. In one embodiment of the foregoing, the first payload is a targeting moiety with specific binding affinity to a target, wherein the targeting moiety is selected from the group consisting of the targeting moieties set forth in Tables 17-19 and 21, and the second payloads is a drug selected from the group consisting of the drugs set forth in Table 6, Table 18, and Table 21. In another embodiment of the foregoing, the first payload is a targeting moiety is selected from the group consisting of LHRH and folate, and the second payload is a drug is selected from the group consisting of doxorubicin, paclitaxel, auristatin, monomethyl auristatin E (MMAE), monomethyl auristatin F, maytansine, dolastatin, calicheamicin, vinca alkaloid, camptothecin, mitomycin C, epothilone, hTNF, Il-12, bortezomib, ranpirnase, pseudomonas exotoxin, SN-38, and rachelmycin. In one embodiment of the foregoing, the first payload is a drug selected from the group consisting of the drugs of Table 11 and the proteins of Table 12 and the second payload is different from the first payload and is selected from the group consisting of the drugs of Table I1 and the proteins of Table 12. In another embodiment of the foregoing, the first payload and the second payload are identical and are selected from the group consisting of the drugs of Table 11 and the proteins of Table 12. In another embodiment of the trimeric XTEN conjugate composition, the composition has the configuration of formula XV:

[chemical structure]

wherein independently for each occurrence; 3×CL is the trivalent cross-linker, CL1 is the first cross-linker conjugated to XTEN₁; x is an integer of 1 to about 10; XTEN₁ is the first XTEN wherein the XTEN is selected from the group consisting of the sequences set forth in Table 3; XTEN₂ is the second XTEN wherein the XTEN is selected from the group consisting of the sequences set forth in Table 2; and XTEN₃ is the third XTEN wherein the XTEN is selected from the group consisting of the sequences set forth in Table 2. In one embodiment of the trimeric XTEN conjugate composition configured as formula XV, the composition further comprises a single atom residue of a first payload conjugated to each first cross-linker of the first XTEN wherein the residue is selected from the group consisting of carbon, nitrogen, oxygen and sulfur. In one embodiment of the trimeric XTEN conjugate composition configured as formula XV. the composition further comprises a first payload conjugated to each first cross-linker of the first XTEN selected from the group consisting of the payloads set forth in Tables 6, 7, 18 and 21.

[0392] In another embodiment of the trimeric XTEN-payload conjugate, each XTEN-payload can be a monomeric fusion protein comprising a biologically active peptide or polypeptide, wherein the fusion protein is linked to the trivalent linker at an amino group or a thiol group of the XTEN. In another embodiment of the trimeric XTEN-payload conjugate, each XTEN-payload can be a conjugate of a payload linked to the XTEN, which can be a biologically active peptide or polypeptide or a pharmacologically active small molecule or toxin, linked to the XTEN that, in turn, is linked to the trivalent linker at the N-terminus of the XTEN. In the foregoing XTEN-linker-payload embodiments hereinabove described in this paragraph, the three payloads can be identical or they can be different. In one embodiment of the trimeric XTEN-payload conjugate, the conjugate comprises at least one biologically active protein and at least one drug linked to different XTEN that, in turn, is linked to the trivalent linker at the N-terminus of the XTEN. In a particular embodiment of the foregoing configuration, the at least one biologically active protein is a targeting moiety and the at least one drug is a toxin including, but not limited to doxorubicin, paclitaxel, auristatin, monomethyl auristatin E, monomethyl auristatin F, maytansine, dolastatin, calicheamicin, vinca alkaloid, camptothecin, mitomycin C, epothilone, hTNF, Il-12, bortezomib, ranpirnase, pseudomonas exotoxin, SN-38, and rachelmycin. Depending on the position of the thiol or the epsilon amino group in the XTEN, one can control if the payload is interior to (as shown in FIG. 23B) or at the terminus of the cross-linked XTEN (as shown in FIG. 23A). In the foregoing embodiment, exemplary, non-limiting targeting moieties include LHRH, folate, octreotide, pasireotide, bombesin, monoclonal antibodies, scFV, centryins, and the antibody fragments, scaffolds and mimetics of Table 17. Exemplary configurations of such trimeric conjugates follow.

[0393] The invention further provides XTEN-linker and XTEN-linker payload conjugates with a tetrameric configuration. In one embodiment, the invention provides conjugates in which four XTEN sequences are linked by a tetravalent linker, resulting in a tetrameric XTEN-crosslinker configuration, such as shown in FIG. 22D. Non-limiting examples of tetravalent linkers include a tetravalent-thiol, a quadrivalent-N-maleimide linker such as described in U.S. Pat. No. 7,524,821, or an antibody or antibody fragment with four reactive groups.

[0394] The invention provides conjugates in which four XTEN-cross-linker precursor sequences are linked by a tetravalent linker, resulting in a tetravalent XTEN-cross-linker configuration. In one embodiment, the invention provides a tetrameric XTEN-crosslinker having the configuration of formula XVI

[chemical structure]

wherein independently for each occurrence: 4×CL is the tetravalent cross-linker; CL₁ is the first cross-linker conjugated to XTEN₁; CL₂ is the second cross-linker conjugated to XTEN₂; CL₃ is the third cross-linker conjugated to XTEN₃; CL₄ is the fourth cross-linker conjugated to XTEN₄; v is an integer of 1 to about 10; x is an integer of 1 to about 10; y is an integer of 1 to about 10; z is an integer of 1 to about 10 with the proviso that x+y+z is ≥4; XTEN₁ is the first XTEN having at least 80%, or at least about 90%, or at least about 91%, or at least about 92%, or at least about 93%, or at least about 94%, or at least about 95%, or at least about 96%, or at least about 97%, or at least about 98%, or at least about 99%, or having 100% sequence identity to a sequence selected from the group of sequences set forth in Tables 2 and 3; XTEN₂ is the second XTEN having at least 80%, or at least about 90%, or at least about 91%, or at least about 92%, or at least about 93%, or at least about 94%, or at least about 95%, or at least about 96%, or at least about 97%, or at least about 98%, or at least about 99%, or having 100% sequence identity to a sequence selected from the group of sequences set forth in Tables 2 and 3; XTEN₃ is the third XTEN having at least 80%, or at least about 90%, or at least about 91%, or at least about 92%, or at least about 93%, or at least about 94%, or at least about 95%, or at least about 96%, or at least about 97%, or at least about 98%, or at least about 99%, or having 100% sequence identity to a sequence selected from the group of sequences set forth in Tables 2 and 3 wherein XTEN₁, XTEN₂, and XTEN₃ are the same or are different XTEN sequences: XTEN₄ is the fourth XTEN having at least 80%, or at least about 90%, or at least about 91%, or at least about 92%, or at least about 93%, or at least about 94%, or at least about 95%, or at least about 96%, or at least about 97%, or at least about 98%, or at least about 99%, or having 100% sequence identity to a sequence selected from the group of sequences set forth in Tables 2 and 3 wherein XTEN₁, XTEN₂, XTEN₃ and XTEN₄ are the same or are different XTEN sequences.

[0395] The invention provides conjugates in which four XTEN-payload precursor sequences are linked by a tetravalent linker, resulting in a tetravalent XTEN-payload configuration as shown in FIGS. 22C and 105. In one embodiment, the invention provides a tetrameric XTEN-payload having the configuration of formula XVII

[chemical structure]

wherein independently for each occurrence: 4×CL is the tetravalent cross-linker; P₁ is conjugated to each cross-linker of the first XTEN and is selected from the group consisting of the payloads set forth in Tables 11, 12, 18 and 21, P2 is a second payload conjugated to each cross-linker of the second XTEN and is selected from the group consisting of the payloads set forth in Tables 11, 12, 18 and 21, wherein the payload is the same or is different from the first payload, P₃ is a third payload conjugated to each cross-linker of the third XTEN and is selected from the group consisting of the payloads set forth in Tables 11, 12, 18 and 21, wherein the payload is the same or is different from the first or the second payload; P₄ is a fourth payload conjugated to each cross-linker of the fourth XTEN and is selected from the group consisting of the payloads set forth in Tables 11, 12, 18 and 21, wherein the payload is the same or is different from the first, the second or the third payload; CL₁ is the first cross-linker conjugated to XTEN₁; CL₂ is the second cross-linker conjugated to XTEN₂; CL₃ is the third cross-linker conjugated to XTEN₃; CL₄ is the fourth cross-linker conjugated to XTEN₄; v is an integer of 1 to about 10; x is an integer of 1 to about 10; y is an integer of 1 to about 10; z is an integer of 1 to about 10 with the proviso that x+y+z is ≥4; XTEN₁ is the first XTEN having at least 80%, or at least about 90%, or at least about 91%, or at least about 92%, or at least about 93%, or at least about 94%, or at least about 95%, or at least about 96%, or at least about 97%, or at least about 98%, or at least about 99%, or having 100% sequence identity to a sequence selected from the group of sequences set forth in Tables 2 and 3; XTEN₂ is the second XTEN having at least 80%, or at least about 90%, or at least about 91%, or at least about 92%, or at least about 93%, or at least about 94%, or at least about 95%, or at least about 96%, or at least about 97%, or at least about 98%, or at least about 99%, or having 100% sequence identity to a sequence selected from the group of sequences set forth in Tables 2 and 3; XTEN₃ is the third XTEN having at least 80%, or at least about 90%, or at least about 91%, or at least about 92%, or at least about 93%, or at least about 94%, or at least about 95%, or at least about 96%, or at least about 97%, or at least about 98%, or at least about 99%, or having 100% sequence identity to a sequence selected from the group of sequences set forth in Tables 2 and 3 wherein XTEN₁, XTEN₂, and XTEN₃ are the same or are different XTEN sequences; XTEN₄ is the fourth XTEN having at least 80%, or at least about 90%, or at least about 91%, or at least about 92%, or at least about 93%, or at least about 94%, or at least about 95%, or at least about 96%, or at least about 97%, or at least about 98%, or at least about 99%, or having 100% sequence identity to a sequence selected from the group of sequences set forth in Tables 2 and 3 wherein XTEN₁, XTEN₂, XTEN₃ and XTEN₄ are the same or are different XTEN sequences.

[0396] In another embodiment of the tetravalent XTEN-payload conjugate, each XTEN-payload can be a monomeric fusion protein comprising a biologically active peptide or polypeptide, wherein the fusion protein is linked to the tetravalent linker at an amino group or a thiol group of the XTEN. In another embodiment of the tetravalent XTEN-payload conjugate, each XTEN-payload can be a conjugate of a payload, which can be a biologically active peptide or polypeptide or a pharmacologically active small molecule or toxin, linked to the XTEN that, in turn, is linked to the tetravalent linker by the N-terminus of the XTEN. In the foregoing XTEN-linker-payload embodiments hereinabove described in this paragraph, the four payloads can be identical or they can be different. In a particular embodiment of the foregoing configuration, the at least one biologically active protein is a targeting moiety and the at least one drug is a toxin including, but not limited to doxorubicin, paclitaxel, auristatin, maytansine, dolastatin, calicheamicin, vinca alkaloid, camptothecin, mitomycin C, epothilone, hTNF, Il-12, bortezomib, ranpirnase, pseudomonas exotoxin, SN-38, and rachelmycin. Depending on the position of the thiol or the epsilon amino group in the XTEN, one can control if the payload is interior to or at the terminus of the cross-linked XTEN.

### 4. Multivalent Configurations with Four or More XTEN-Payloads

[0397] Using XTEN of Table 3, compositions are contemplated containing four or more XTEN-payload molecules linked to the cysteine- or lysine-engineered backbone, resulting in a “comb” multivalent configuration, or linking multiple branched precursors to make a “dendrimer” configuration, as illustrated in FIG. 7. In one embodiment, the multivalent configuration conjugate is created by reacting a cysteine- or lysine-engineered XTEN with an XTEN-payload comprising a linker appropriate for reaction with the cysteine- or lysine-engineered XTEN (as illustrated in FIGS. 24A-24C), resulting in the final product. In another embodiment, the multivalent configuration conjugate is created by reacting a cysteine- or lysine-engineered XTEN with linkers with an XTEN-payload comprising a cysteine or a primary or epsilon amino group appropriate for reaction with the linker linked to the cysteine- or lysine-engineered XTEN, resulting in the final product. In the embodiments, the valency of the final product is controlled by the number of reactive groups incorporated into the XTEN, whether a reactive amino acid or linker. Additionally, it is contemplated that the final product can be designed to locate the payload either close to the XTEN termini, which improves interactions with its ligand, or close to the branch points to shield the payload and reduce the degree of interaction with the ligand.

### 5. Bispecific Payload Configurations on Monomer XTEN Backbone

[0398] In another aspect, the invention provides conjugates containing two different payload molecules linked to a single cysteine- and lysine-engineered XTEN backbone, as illustrated in FIG. 27A, resulting in a bivalent conjugate. In one embodiment, the bivalent configuration conjugate is created by reacting the engineered XTEN, such as those specifically provided in Table 3, with a first XTEN-payload comprising a linker appropriate for reaction with the cysteine-engineered XTEN, followed by a second reaction with a second XTEN-payload comprising a linker appropriate for reaction with the lysine-engineered XTEN, resulting in the final product. The number and location of payloads is controlled by the design of the engineered XTEN, with the placement of the reactive thiol or amino group being determinative. In one embodiment, the bivalent conjugate comprises a single molecule of a first payload and a single molecule of a second payload linked to the cysteine-lysine-engineered XTEN by linkers. In another embodiment, the bivalent conjugate comprises one, or two, or three, or four, or five molecules of a first payload and a single molecule of a second payload linked to the cysteine-lysine-engineered XTEN by linkers. In another embodiment, the bivalent conjugate comprises one, or two, or three, or four, or five molecules of a first payload and one, or two, or three, or four, or five molecules of a second payload linked to the cysteine-lysine-engineered XTEN by linkers.

[0399] In another embodiment, the bivalent configuration conjugate is created by reacting the cysteine- and lysine-engineered XTEN, such as those of Table 3, with a first linker appropriate for reaction with the cysteine-engineered XTEN, followed by a second reaction with a linker appropriate for reaction with the lysine-engineered XTEN, then reacting the XTEN-crosslinker backbone with a first payload with a thiol reactive group capable of reacting with the first linker, followed by a reaction of a second payload with an amino group capable of reacting with the second cross-linker, resulting in the final product.

### 6. XTEN-Cross-Linker and XTEN-Payload Conjugates with Spacer and Release Groups

[0400] In another aspect, the invention provides XTEN-crosslinker and XTEN-payload conjugates configured with one or more spacers incorporated into or adjacent to the XTEN that are designed to incorporate or enhance a functionality or property to the composition, or as an aid in the assembly or manufacture of the compositions. Such properties include, but are not limited to, inclusion of a sequence capable of being proteolytically cleaved or a labile functional group to permit release of the payload, or a spacer can be introduced between an XTEN sequence and a payload component to decrease steric hindrance such that the payload component may interact appropriately with its target ligand.

[0401] In one embodiment, the one or more spacers are incorporated into the linkers of the subject conjugates. For spacers and methods of identifying desirable spacers, see, for example, George, et al. (2003) Protein Engineering 15:871-879, specifically incorporated by reference herein. In one embodiment, the spacer comprises one or more peptide sequences that are between 1-50 amino acid residues in length, or about 1-25 residues, or about 1-10 residues in length. Spacer sequences, exclusive of cleavage sites, can comprise any of the 20 natural L-amino acids, and will preferably have XTEN-like properties in that the majority of residues will be hydrophilic amino acids that are sterically unhindered. The spacer can be polyglycines or polyalanines, or is predominately a mixture of combinations of glycine, serine and alanine residues. In one embodiment, the spacer sequence is a sequence from Table 15. In another embodiment, the spacer sequence is GPEGPS (SEQ ID NO: 580).

[0402] In addition, spacer sequences are designed to avoid the introduction of T-cell epitopes which can, in part, be achieved by avoiding or limiting the number of hydrophobic amino acids utilized in the spacer, the determination of epitopes is described above and in the Examples.

[0403] In one embodiment, the spacer comprises a release group that permits the release of the payload from the conjugate. In another embodiment, the cross-linker comprises a release group that permits the release of the payload from the conjugate. The release group may be any labile group providing for such a releasable attachment. In one embodiment, the release group is a chemically cleavable linkage or labile chemical linkage. Such linkages may typically be cleaved by methods that are well known to those of skill in the art, such as by acid, base, oxidation, reduction, displacement or elimination. In a particular embodiment, the chemistry cleavable linkage comprises a modified base, a modified sugar, a disulfide bond, a chemically cleavable group incorporated into the cross-linker or spacer. Some examples of these linkages are described in PCT WO 96/37630 and U.S. Pat. No. 7,132,519, incorporated herein by reference. Release groups encompassed by the invention also include groups or linkages cleavable by an enzyme. Enzymatically-cleavable release groups include phosphodiester or amide linkages as well as restriction endonuclease recognition sites. In one embodiment, the invention provides compositions comprising one or more payloads in which a cleavable linker of valine-citrulline is between the payload and the XTEN, permitting cleavage by cathepsin when the composition is internalized intracellularly; e.g., inside a tumour cell. In another embodiment, release groups are cleavable by nucleases. These nucleases may typically be an exonuclease or a restriction endonuclease. Typical exonucleases include exonucleases specific for both double-stranded and single-stranded polynucleic acids. Additionally, restriction endonucleases encompassed by certain embodiments include Type IIS and Type II restriction endonucleases. In other embodiments the release group may be a sequence that is cleavable by a protease, wherein the sequence is selected from the sequences set fort in Table 9. Typical proteases acting on sequences suitable for inclusion in the inventive compositions include endoproteinases, including the proteinases of Table 9.

### 7. Libraries of XTEN-Payload Configurations

[0404] In another aspect, the invention provides libraries of XTEN-payload precursors, methods to make the libraries, and methods to combine the library precursors in a combinatorial approach, as illustrated in FIGS. 34-35, to achieve optimal combinations of, as well as the optimal ratio of payloads. In one embodiment, the invention provides a library of individual XTEN each linked to 1, or 2, or 3, or 4, or 5, or 6, or 7, or 8, or 9, or 10 or more or more molecules of a given payload, including those described herein, to create the library of XTEN-payload precursors. In the method, a series of XTEN-payload precursors to be linked are further conjugated to a linker, and then is subsequently mixed and reacted with the other XTEN-payload precursors capable of reacting with the linker under conditions to effect the conjugation, resulting in a library of the various permutations and ratios of payloads linked to XTEN. Such a library is then screened in an in vitro or in vivo assay suitable to assess a parameter in a given clinical indication (e.g., cancer, metabolic disorder, diabetes) in order to determine those compositions providing the optimal response. In one exemplary embodiment, one category of payload precursor includes various targeting modules, such as peptides (e.g., the targeting moieties of Table 17) with binding affinity to a tumor-associated antigen of Table 20, and the second category of precursor is one or more drugs, such as a cytotoxic drug or a drug chosen from Table 9. Each category of precursor to be linked is further conjugated to a linker, and, as illustrated in FIG. 36, is subsequently mixed and reacted with the other XTEN-payload precursors capable of reacting with the linker under conditions to effect the conjugation, resulting in a library of the various targeting moieties and drug permutations in varying ratios to each other. The XTEN-payload conjugates are designed to permit fixed ratios of one payload to another, e.g., is 1:1, or 1:1.5, or 1:2, or 1:3, or 2:3, or 1:4, or 1:5 or 1:9 in the case of two different payloads. Similar ranges of ratios would be applied for library conjugates comprising 3, 4, 5 or more payloads.

[0405] In other embodiments, the libraries are constructed using three or more payloads known to have a beneficial effect in the treatment of a common disease. In one embodiment, a library comprises payloads linked to XTEN, wherein each payload is a drug or biologically effective for ameliorating a common disease. In another embodiment, a library comprises payloads linked to XTEN, wherein each drug or biologic is effective for treating different symptoms of a common disease. In another embodiment, a library comprises payloads linked to XTEN, wherein each drug or biologic mediates their therapeutic effect via a common biological pathway. In the foregoing embodiments of the libraries, the common disease is selected from cancer, cancer supportive care, cardiovascular, central nervous system, endocrine disease, gastrointestinal, genitourinary, hematological, HIV infection, hormonal system, inflammation, autoimmune disease, infectious diseases, metabolic disease, musculoskeletal disease, nephrology disorders, ophthalmologic diseases, pain, and respiratory. With greater particularity, the disease for which the libraries are constructed with payloads known to have a beneficial effect is selected from Table 16. Payloads suitable for use in the treatment or prevention of such diseases include those described herein (e.g., the payloads of Tables 11, 12, 18, and 21), or can be found in commonly accessible databases or would otherwise be known to those of ordinary skill in the art.

TABLE 16
Diseases for which Payloads are Indicated
Disease

Achondroplasia
Acromegaly
AIDS
Alzheimer's disease
Anemia
Arthritis
Asthma
Atherosclerosis
Autism
Autoimmune disease
Batten disease
Bone & cartilage repair
Cachexia
Cancer (all types)
Cardiovascular diseases
Chemotherapy-induced diseases
Chronic kidney disease-induced
complication
Coagulation disorder
Colitis
Congenital hyperinsulinism
Congestive heart failure
COPD
Crohn's disease
Cystic fibrosis
Diabetes
Diabetes-induced complication
Diabetic nephropathy
Diabetic neuropathy
Diagnostic
Eating disorder
Erythropoietic
protoporphyria
Gastrointestinal disorder
Gout
Growth hormone deficiency
Hemophilia
Hepatitis B
Hepatitis C
Hereditary emphysema
HIV
Hyperlipidemia/Dyslipidemia
Hyperparathyroidism
Hypertension
Hypoglycemia
Hypoparathyroidism
Hypothyroidism
Infectious diseases
Infertility
Inflammatory diseases
Lipodystrophy
Lymphopenia
Macular degeneration
Metabolic conditions
Mucositis
Multiple sclerosis
Muscular dystrophy
Musculoskeletal
Myocardial
infarction/ischemia
Neutropenia
Obesity
Osteoarthritis
Osteoporosis
Pain
Parkinsons disease
Paroxysmal nocturnal
hemoglobinuria
Phenylketonuria
Psoriasis
Pulmonary arterial
hypertension
Pulmonary
hypertension
Radiotherapy-
induced diseases
Sepsis
Sexual dysfunction
Short bowel
syndrome
Stroke
Thrombocytopenia
Thyroid disease
Transplantation
Viral infection

[0406] In one embodiment, as illustrated in FIG. 37, the bispecific conjugate has a drug module linked to the XTEN by a cleavable or labile linker, wherein the linker can be cleaved or disassociates after administration to a subject, including upon intracellular internalization in a cell targeted by the targeting modules. In another embodiment the drug is linked to XTEN by an non-cleavable linker but the conjugate remains susceptible to degradation. Upon internalization the XTEN is cleaved by proteases and the drug connected to its linker is liberated resulting in cytotoxicity.

[0407] In one exemplary embodiment, the targeting module is luteinizing hormone-releasing hormone (aka LHRH, GnRH, and gonadotropin-releasing hormone), the drug is doxorubicin, wherein the ratio of LHRH to doxorubicinis: 1:1, or: 1.5, or 1:2, or 1:3, or 1:9, or 2:3, or 3:1, or 3:2, or 2:1, or 1.5:1. The conjugate can be generated starting from XTEN precursors. One XTEN precursor can carry 1, 2, or more drug molecules and a reactive cross-linker or click chemistry reactant or a reactive amino acid. A second XEN precursor carries 1, 2, or more LHRH domains for targeting and a reactive cross-linker or click chemistry reactant or a reactive amino acid. Both precursor segments are then joined by reaction between reactive groups of the respective XTEN. In one exemplary embodiment the reactive group is an azide that is conjugated to the N-terminus of first XTEN segment via a cross-linker, and reactive group of the second XTEN is an alkyne that is conjugated to the N-terminus of the second XTEN segment via a cross-linker. In another embodiment of the LHRH-XTEN-drug conjugate, the drug is maytansin. In another embodiment of the LHRH-XTEN-drug conjugate the drug is auristatin.

### 8. Conjugates of XTEN-Payload Linked to Targeting Moieties

[0408] In another aspect, the present invention provides conjugate compositions comprising one or more XTEN-payload compositions linked to targeting moieties. The subject targeted compositions find use in the treatment of a variety of conditions where selective delivery of a therapeutic or toxic payload to a cell, tissue or organ is desired. The invention contemplates a diversity of targeting moieties for use in the subject compositions, including antibodies, antibody fragments, and antibody mimetics including, but not limited to those set forth in Table 17, as well as peptides and small molecules capable of binding ligands or receptors associated with disease or metabolic or physiologic abnormalities. In one embodiment, the invention provides a conjugate comprising at least one targeting moiety from Tables 17, 18 or 21 linked to at least one XTEN. In another embodiment, the invention provides a conjugate comprising at least one targeting moiety from Tables 17, 18 or 21 linked to each of at least two, or three, or four XTEN. In another embodiment, the invention provides a conjugate comprising at least one targeting moiety from Tables 17, 18 or 21 linked to at least one XTEN and at least one drug or biologic payload selected from the group consisting of the payloads set forth in Table 11, Table 12, Table 18, or Table 21 linked to the at least one XTEN. In one embodiment, the invention provides targeting moiety-XTEN-drug conjugate compositions wherein the composition is selectively delivered to a ligand or receptor on a targeted cell, which can then be internalized into the cell, as illustrated in FIG. 37, resulting in a pharmacologic effect know in the art for the drug component.

[0409] As illustrated in FIGS. 21-24, and 28-32, such conjugate compositions can have different valencies, with one, two, three, or four or more XTEN-payload molecules linked to one or more targeting antibody or targeting moiety. In the case of antibody targeting moieties, in one embodiment the XTEN-payload is linked by a cross-linker to a cysteine in a hinge region of the antibody. In another embodiment, the XTEN-payload is linked by a disulfide bridge to a cysteine in a hinge region of the antibody. Accordingly, an antibody-XTEN-payload conjugate can comprise 1, 2, 3, or 4 or more XTEN-payload segments linked to the antibody, antibody fragment or mimetic. In another embodiment XTEN is conjugated outside of the hinge region, which includes inserting cysteine in the antibody to control conjugation sites or by conjugation to existing lysine side chains. The linking of XTEN-payload to create the antibody conjugates has many benefits: a) the XTEN payload serves as a cleavable linker, b) it provides solubility, c) it allows setting the ratio of drugload per IgG, and d) it can be pre-conjugated with drug to simplify manufacturing.

TABLE 17
Targeting Moieties: Antibody fragments, scaffolds and mimetics
Targeting Moieties

ABDURINS
AdNectins/Fibronectin type III domain
Adnexins/Fibronectin
Affibodies/Protein Z
Affilins
AFFINILUTE
AFFINIMIP
AFIM
Anticalins/Lipocalins
Aptabody
Aptamers
Armadillo repeat proteins
Avimers
Azymetric
Bispecific diabodies
BiTEs
Bivalent diabodies
Centyrins
DARPins/Ankyrin repeat proteins
Diabodies
Domain antibodies/dAbs/human Vh
Engineered affinity proteins
Evibodies
Fabs
Fv
Fynomers
Glubody
Im7/ColE7 immunity protein
iMabs
Knottin/Cysteine-knot miniproteins
Kunitz domains
Maxibodies
Microbodies
Minibodies
Molecular imprinted polymers (MIPs)
Monobodies
Monoclonal T cell receptors (mTCR)
MonoLex
Nanobodies
Nanofitins
Phylomers
Shark Vhh
SMIPs
SOMAmers
Stable scFV
Spiegelmers
Synbodies
TandAbs ®
Telobodies
Tetrabodies
Tetranectins
Tetravalent bispecific antibodies
Trans-body
Triabodies

[0410] In some embodiments, the invention provides conjugates comprising a targeting component as one payload and a toxin as a second payload, with one or more copies of each payload type linked to the XTEN of the composition. In a variation of the foregoing, the conjugate can optionally have the toxin linked to the XTEN with a labile or a cleavable linker such that the toxin is liberated when delivered to or is internalized within the target. In another variation of the foregoing, the targeting component is an antibody or antibody fragment, with one, two, three, or four XTEN-payload compositions conjugated with linkers to the antibody (e.g., conjugated to cysteines in the hinge region as illustrated in FIGS. 28-29), providing conjugates for use in targeted therapy of clinical indications such as, but not limited to, various treatment of tumors and other cancers wherein the antibody provides the targeting component and the XTEN-payload effects the intended activity (e.g, cytotoxicity in a tumor cell). Hence, the inventive conjugates are a type of immunoconjugate. The targeted conjugates can be designed with targeting components that are derived from antibodies, or antibody mimetics, or are peptides or small molecules that bind ligands associated with diseases cells or organs. Non-limiting examples of categories of antibody fragments, scaffolds and mimetics are provided in Table 17. Non-limited examples of specific targeting components, the targets to which they are directed, and toxins that may be utilized as payloads in the inventive conjugates are provided in Table 18. It is specifically contemplated that the targeted conjugate compositions of the present disclosure include compositions of any given targeting component that can be used in combination with one or more of any of the toxins of Table 18 or the payloads provided in Table 11 or Table 12. It is further contemplated that an XTEN-payload conjugate can comprise two or more targeting components, which may be identical or may be different. It is contemplated that such conjugates can be used in treatment of conditions such as, but not limited to those set forth in Table 15.

TABLE 18
Exemplary targeting moieties, toxin payloads, and targets to which conjugate
compositions can be directed

| Class | Target | Targeting Moiety | Toxin |
|---|---|---|---|
| Peptide | LHRHR | LHRH & analogues (e.g. D- | doxorubicin |
| | | Lys-(6)-LHRH) | paclitaxel |
| | CD13, Aminopeptidase | NGR class (e.g. CNGRC (SEQ | auristatin (e.g. |
| | | ID NO: 581), CNGRCG (SEQ | monomethyl |
| | | ID NO: 582), GNGRG (SEQ | auristatin E; |
| | | ID NO: 583), KNGRE (SEQ ID | monomethyl |
| | | NO: 584), (GNGRG)2KGK | auristatin F) |
| | | (SEQ ID NO: 585), | maytansine (e.g. |
| | | CVLNGRMEC (SEQ ID NO: | maytansinoid DM1; |
| | | 586), NGRAHA (SEQ ID NO: | maytansinoid DM4) |
| | | 587), CNGRCVSGCAGRC | dolastatin |
| | | (SEQ ID NO: 588)) | calicheamicin |
| | Folate receptor | Folate & analogue (e.g. γ- | vinca alkaloid (e.g. |
| | | folate, α-folate; pteroate-gly) | desacetylvinblastine |
| | Integrin | Cilengitide; RGD-4C; iRGD | monohydrazide) |
| | LRP receptor | Angiopep-2 | camptothecin |
| | Somatostatin receptor | Somatostatin & analogues (e.g. | mitomycin C |
| | | octreotide; pasireotide; | epothilone |
| | | lanreotide; vapreotide, JF-07- | hTNF |
| | | 69) | IL-12 |
| | Nucleolin | F3 peptide | Bortezomib |
| | PDGFR-beta | RGR | Ranpirnase |
| | LyP-1 receptor | LyP-1; CGNKRTRGC (SEQ | pseudomonas |
| | | ID NO: 589) | exotoxin |
| | Chondroitin sulfate | TAASGVRSMH (SEQ ID NO: | SN-38 |
| | proteoglygan NG2 | 590); LTLRWVGLMS (SEQ | Rachelmycin |
| | | ID NO: 591) | m-TOR inhibitor |
| | VPAC1 and VPAC2 | Vasoactive intestinal peptide | rapamycin |
| | CCK1 and CCK2 | Cholecystokinin | tubulysin (tubulysin |
| | Gastrin receptor, CCK1 & | Gastrin | B; tubulysin M) |
| | CCK2 | | duocarmycin |
| | GRP receptor subtype | Gastrin-releasing peptide | |
| | Neurotensin receptor | Neurotensin | |
| | Alpha-MSH receptor | Alpha-melanocyte stimulating | |
| | | hormone | |
| | Oxytocin receptor | Oxytocin | |
| | Lymphatic vessels | LyP-2; CNRRTKAGC (SEQ | |
| | | ID NO: 592) | |
| | Lymphatic vessels | LSD; CLSDGKRKC (SEQ ID | |
| | | NO: 593) | |
| | Lymphatic vessels | REA; CREAGRKAC (SEQ ID | |
| | | NO: 594) | |
| | Lymphatic vessels | AGR, CAGRRSAYC (SEQ ID | |
| | | NO: 595) | |
| | Pericytes & endothelia cells | RSR; CRSRKG (SEQ ID NO: | |
| | | 596) | |
| | Pericytes & endothelia cells | KAA; CKAAKNK (SEQ ID | |
| | | NO: 597) | |
| | Blood vessels | CSRPRRSEC (SEQ ID NO: | |
| | | 598) | |
| | Angiogenic blood vessels & | KRK; CGKRK (SEQ ID NO: | |
| | tumor cells | 599) | |
| | Angiogenic blood vessels | CDTRL (SEQ ID NO: 600) | |
| | Angiogenic blood vessels & | CGTKRKC (SEQ ID NO: 601) | |
| | tumor cells | | |
| Protein | DR4, DR5 | TRAIL | |
| | Various | DARPINS | |
| Antibody-like | Various | Centyrins | |
| scaffold | | | |
| Antibody | Lewis-Y-related antigen | Br96; anti-Lewis-Y-related | |
| | | antigen antibody | |
| | HER2 | Trastuzumab; Pertuzumab; | |
| | | anti-HER2 antibody | |
| | EGFR | Cetuximab; anti-EGFR | |
| | | antibody | |
| | Nectin-4 | anti-nectin-4 antibody | |
| | CanAg (mucin-type | huC242, anti-CanAg antibody | |
| | glycoprotein) | | |
| | CD138 | anti-CD138 antibody | |
| | CD19 | MDX-1342; MOR-208; HuB4; | |
| | | anti-CD19 antibody | |
| | CD22 | Epratuzumab; Bectumomab; | |
| | | Inotuzumab; Moxetumomab, | |
| | | RFB4; anti-CD22 antibody | |
| | CD23 | Lumiliximab, anti-CD23 | |
| | | antibody | |
| | CD25 (IL-2 receptor) | Daclizumab, anti-CD25 | |
| | | antibody | |
| | CD30 | Xmab2513; cAC10; MDX-060; | |
| | | anti-CD30 antibody | |
| | CD33 | Gemtuzumab; HuM195; | |
| | | huMy9-6; anti-CD33 antibody | |
| | CD38 | Daratumumab, anti-CD38 | |
| | | antibody | |
| | CD40 | SGN-40; HCD122; anti-CD40 | |
| | | antibody | |
| | CD56 | huN901; anti-CD56 antibody | |
| | CD70 | MDX-1411; anti-CD70 | |
| | | antibody | |
| | CD74 | Milatuzumab; anti-CD74 | |
| | | antibody | |
| | CD79b | anti-CD79b antibody | |
| | CD80 | Galiximab; anti-CD80 antibody | |
| | Carcinoembryonic antigen | Lapetuzumab, hCOL-1anti- | |
| | (CEA) | CEA antibody | |
| | Cripto | anti-Cripto antibody | |
| | cMET | CE-355621, DN30, MetMAb; | |
| | | antagonist anti-cMET antibody | |
| | EpCAM | Adecatumumab; Edrecolomab; | |
| | | Catumaxomab; anti-EpCAM | |
| | | antibody | |
| | EphA2 | 1C1, anti-EphA2 antibody | |
| | GPNMB (human gylcoprotein | glembatumumab, anti-GPNMB | |
| | NMB (osteoactivin)) | antibody | |
| | Integrins | anti-integrin antibody | |
| | MUC-1 (epitope CA6) | anti-MUC-1 antibody | |
| | PSMA | MDX-070, MLN591, anti- | |
| | | PSMA antibody | |
| | TGFa | anti-TGFa antibody | |
| | TIM1 | anti-TIM1 antibody | |
| | Folate receptor 1 | M9346A, Farletuzumab, anti- | |
| | | folate receptor antibody | |
| | IL-13 receptor | anti-IL-13 receptor antibody | |

[0411] In particular embodiments, the invention provides XTEN-payload conjugates comprising one or more LHRH targeting components selected from Table 19 and one or more drug components selected from Table 11. In the foregoing embodiment, the LHRH can be linked to one XTEN segment that, in turn, is linked to one or more XTEN segments to which the drug components are conjugated. Alternatively, the LHRH and drug components can be conjugated to a monomeric XTEN. Further, the drug components can optionally be linked to XTEN using labile or cleavable linkers that permit the drug to be liberated from the conjugate after administration to a subject.

TABLE 19
Exemplary LHRH

| Composition | SEQ ID NO: |
|---|---|
| pGlu-HWSYGLRPG-NH2 | 602 |
| pGlu-HWSY[D-Lys]LRPG-NH2 | 603 |
| pGlu-HWSY[D-Trp]LRPG-NH2 | 604 |
| pGlu-HWSY[D-Leu]LRP-NHEt | 605 |
| pGlu-HWSY[D-Ser(tBu)]LRP-NHEt | 606 |
| pGlu-HWSY[D-2-Nal]LRPG-NH2 | 607 |
| pGlu-HWSY[D-His(Bzl)]LRP-NHEt | 608 |
| pGlu-HWSY[D-Ser(tBu)]LRP- | 609 |
| Azagly-NH2 | |
| pGlu-HWSY[D-Trp]LRP-NHEt | 610 |
| pGlu-HWSHDWLPG-NH2 | 611 |

[0412] Additional targets contemplated for which the XTEN-payload conjugates can be directed include tumor-associated antigens listed in Table 20. In one embodiment, the invention provides XTEN-payload conjugates comprising one or more targeting components capable of binding one or more targets of Table 20.

TABLE 20
Tumor-associated antigen targets

| TAA targets (synonyms) | Accession Number and References |
|---|---|
| Her2 (ErbB2) | GenBank accession no. M11730; U.S. Pat. No. |
| | 5,869,445; WO2004048938; WO2004027049; |
| | WO2004009622; WO2003081210; WO2003089904; |
| | WO2003016475; US2003118592; WO2003008537; |
| | WO2003055439; WO2003025228; WO200222636; |
| | WO200212341; WO200213847; WO200214503; |
| | WO200153463; WO200141787; WO200044899; |
| | WO200020579; WO9630514; EP1439393; |
| | WO2004043361; WO2004022709; WO200100244 |
| BMPR1B (bone morphogenetic | GenBank accession no. NM_001203; WO2004063362; |
| protein receptor-type IB) | WO2003042661; US 2003134790; WO2002102235; |
| | WO2003055443; WO200299122; WO2003029421; |
| | WO2003024392; WO200298358′ WO200254940; |
| | WO200259377; WO200230268 |
| E16 (LAT1, SLC7A5) | GenBank accession no. NM_003486); WO2004048938; |
| | WO2004032842; WO2003042661; WO2003016475; |
| | WO200278524; WO200299074; WO200286443; |
| | WO2003003906; WO200264798; WO200014228; |
| | US2003224454; WO2003025138 |
| STEAP1 (six transmembrane | GenBank accession no. NM_012449; WO2004065577; |
| epithelial antigen of prostate) | WO2004027049; EP1394274; WO2004016225; |
| | WO2003042661; US2003157089; US2003185830; |
| | US2003064397; WO200289747618; WO2003022995 |
| STEAP2 (six transmembrane | GenBank accession no. AF455138; WO2003087306; |
| epithelial antigen of prostate 2) | US2003064397; WO200272596; WO200172962; |
| | WO2003104270; WO2003104270; US2004005598; |
| | WO2003042661; US2003060612; WO200226822; |
| | WO200216429 |
| CA125/0772P (MUC16) | GenBank accession no. AF361486; WO2004045553; |
| | WO200292836; WO200283866; US2003124140 |
| megakaryocyte potentiating factor | GenBank accession no. NM_005823; WO2003101283; |
| (MPF, mesothelin) | WO2002102235; WO2002101075; WO200271928; |
| | WO9410312 |
| Na/Pi cotransporter type IIb | GenBank accession no. NM_006424; WO2004022778; |
| (NaPi3b) | EP1394274; WO2002102235; EP875569; |
| | WO200157188; WO2004032842; WO200175177 |
| Semaphorin 5b (SEMA5B, | GenBank accession no. AB040878; WO2004000997; |
| SEMAG) | WO2003003984; WO200206339; WO200188133; |
| | WO2003054152; WO2003101400 |
| Prostate cancer stem cell antigen | GenBank accession no. AY358628; US2003129192; |
| (PSCA hlg) | US2004044180; US2004044179; US2003096961; |
| | US2003232056; WO2003105758; US2003206918; |
| | EP1347046; WO2003025148 |
| ETBR (Endothelin type B receptor) | GenBank accession no. AY275463; WO2004045516; |
| | WO2004048938; WO2004040000; WO2003087768; |
| | WO2003016475; WO2003016475; WO200261087; |
| | WO2003016494; WO2003025138; WO200198351; |
| | EP522868; WO200177172; US2003109676; U.S. Pat. |
| | No. 6,518,404; U.S. Pat. No. 5,773,223; WO2004001004 |
| TRPV4 (Transient receptor potential | US Pat App No. 20090208514 |
| cation channel, subfamily V) | |
| CDC45L | GenBank Accession NO. AJ223728; |
| | US Pat App No. 20090208514 |
| CRIPTO (CR, CR1, CRGF) | GenBank accession no. NP_003203 or NM_003212; |
| | US2003224411; WO2003083041; WO2003034984; |
| | WO200288170; WO2003024392; WO200216413; |
| | WO200222808; U.S. Pat. No. 5,854,399; U.S. Pat. No. 5,792,616 |
| CD21 (CR2 (Complement receptor | GenBank accession no. M26004; WO2004045520; |
| 2) or C3DR (C3d/Epstein Barr virus | US2004005538; WO2003062401; WO2004045520; |
| receptor) | WO9102536; WO2004020595 |
| CD79b (CD79B, CD79β, IGb | GenBank accession no. NM_000626 or 11038674; |
| (immunoglobulin-associated beta), | WO2004016225; WO2003087768; US2004101874; |
| B29) | WO2003062401; WO200278524; US2002150573; U.S. |
| | Pat. No. 5,644,033; WO2003048202; WO 99/558658, |
| | U.S. Pat. No. 6,534,482; WO200055351 |
| FcRH2 (IFGP4, IRTA4, SPAP1A | GenBank accession no. NM _030764, AY358130; |
| (SH2 domain containing | WO2004016225; WO2003077836; WO200138490; |
| phosphatase anchor protein 1a), | WO2003097803; WO2003089624 |
| SPAP1B, SPAP1C) | |
| NCA (CEACAM6) | GenBank accession no. M18728; WO2004063709; |
| | EP1439393; WO2004044178; WO2004031238; |
| | WO2003042661; WO200278524; WO200286443; |
| | WO200260317 |
| MDP (DPEP1) | GenBank accession no. BC017023; WO2003016475; |
| | WO200264798 |
| IL20Rα (IL20Ra, ZCYTOR7) | GenBank accession no. AF184971; EP1394274; |
| | US2004005320; WO2003029262; WO2003002717; |
| | WO200222153; US2002042366; WO200146261; |
| | WO200146232; WO9837193 |
| BECAN (Brevican core protein) | GenBank accession no. AF229053; US2003186372; |
| | US2003186373; US2003119131; US2003119122; |
| | US2003119126; US2003119121; US2003119129; |
| | US2003119130; US2003119128; US2003119125; |
| | WO2003016475; WO200202634 |
| EphB2R (DRT, ERK, Hek5, | GenBank accession no. NM_004442; WO2003042661; |
| EPHT3, Tyro5) | WO200053216; WO2004065576 (Claim 1); |
| | WO2004020583; WO2003004529; WO200053216 |
| B7h (ASLG659) | GenBank accession no. AX092328; US20040101899; |
| | WO2003104399; WO2004000221; US2003165504; |
| | US2003124140; US2003065143; WO2002102235; |
| | US2003091580; WO200210187; WO200194641; |
| | WO200202624; US2002034749; WO200206317; |
| | WO200271928; WO200202587; WO200140269; |
| | WO200036107; WO2004053079; WO2003004989; |
| | WO200271928 |
| PSCA (Prostate stem cell antigen | GenBank accession no. AJ297436; WO2004022709; |
| precursor | EP1394274; US2004018553; WO2003008537 (Claim 1); |
| | WO200281646; WO2003003906; WO200140309; |
| | US2001055751; WO200032752; WO9851805; |
| | WO9851824; WO9840403 |
| BAFF-R (B cell-activating factor | GenBank accession No. AF116456; WO2004058309; |
| receptor, BLyS receptor 3, BR3) | WO2004011611; WO2003045422; WO2003014294; |
| | WO2003035846; WO200294852; WO200238766; |
| | WO200224909 |
| CD22 (B-cell receptor CD22-β- | GenBank accession No. AK026467; WO2003072036 |
| form, BL-CAM, Lyb-8, Lyb8, | |
| SIGLEC-2, FLJ22814) | |
| CD79a (immunoglobulin-associated | GenBank accession No. NP_001774.10; |
| alpha) | WO2003088808, US20030228319; WO2003062401; |
| | US2002150573; WO9958658; WO9207574; U.S. Pat. |
| | No. 5,644,033 |
| CXCR5 (Burkitt's lymphoma | GenBank accession No. NP_001707.1; |
| receptor 1) | WO2004040000; WO2004015426; US2003105292; U.S. |
| | Pat. No. 6,555,339; WO200261087; WO200157188; |
| | WO200172830; WO200022129; WO9928468; U.S. Pat. |
| | No. 5,440,021; WO9428931; WO9217497 |
| HLA-DOB | GenBank accession No. NP _002111.1; WO9958658; |
| | U.S. Pat. No. 6,153,408; U.S. Pat. No. 5,976,551; |
| | U.S. Pat. No. 6,011,146 |
| P2X5 | GenBank accession No. NP_002552.2; |
| | WO2004047749; WO2003072035; WO200222660; |
| | WO2003093444; WO2003087768; WO2003029277 |
| CD72 (B-cell differentiation antigen | GenBank accession No. NP_001773.1; |
| CD72, Lyb-2) | WO2004042346; WO2003026493; WO200075655 |
| CD180 (LY64) | GenBank accession No. NP_005573.1; US2002193567; |
| | WO9707198; WO2003083047; WO9744452 |
| FcRH1 (Fc receptor-like protein 1) | GenBank accession No. NP_443170.1) |
| | WO2003077836; WO200138490; WO2003089624; |
| | EP1347046; WO2003089624 |
| IRTA2 (Immunoglobulin | GenBank accession No. Human: AF343662, AF343663, |
| superfamily receptor translocation | AF343664, AF343665, AF369794, AF397453; |
| associated 2) | WO2003024392; WO2003077836; WO200138490 |
| TENB2 (TMEFF2, tomoregulin, | GenBank accession No. AF179274; AY358907, |
| TPEF, HPP1) | CAF85723, CQ782436; WO2004074320; |
| | WO2003042661; WO2003009814; EP1295944; |
| | WO200230268; WO200190304; US2004249130; |
| | US2004022727; WO2004063355; US2004197325; |
| | US2003232350; US2004005563; US2003124579 |
| CS1 (CRACC, 19A, APEX-1, | GenBank Accession No. NM 021181; US 20100168397 |
| FOAP12) | |
| DLL4 | GenBank Accession No. NM 019074; US 20100303812 |
| Lewis Y | ADB235860; U.S. Pat. No. 7,879,983 |
| CD40 (Bp50, CDW40, MGC9013, | AL035662.65; U.S. Pat. No. 6,946,129 |
| TNFRSF5, p50) | |
| OBA1 (5T4) | GenBank Accession No. NP_001159864.1; US |
| | 20100021483 |
| p97 | Woodbury et al., 1980, Proc. Natl. Acad. Sci. USA 77: |
| | 2183-2186; Brown et al., 1981, J. Immunol. 127: 539- |
| | 546 |
| carcinoembryonic antigen (CEA) | GenBank Accession No. NP_004354.2; U.S. Pat. No. 6,676,924 |
| TAG-72 | U.S. Pat. No. 7,256,004 |
| DNA | |
| Neuropilin-1 (NRP1) | GenBank Accession No. NP_001019799.1; US |
| | 20080213268 |
| A33 | GenBank Accession No. NP_005805.1; U.S. Pat. No. 7,579,187 |
| Mucin-1 (MUC1) | GenBank Accession No. NP_001018016.1; |
| | NP_001018017.1; U.S. Pat. No. 7,183,388 |
| ED-B fibronectin | U.S. Pat. No. 7,785,591 |
| Thomsen-Friedenreich antigen (TF) | U.S. Pat. No. 7,374,755; US20100297159 |
| Bombesin receptor | U.S. Pat. No. 5,750,370 |
| CanAg | |
| Carcinoembryonic antigen (CEA) | U.S. Pat. No. 4,818,709 |
| CD13 | |
| CD138 | |
| CD30 | |
| CD47 | |
| CD56 | |
| CD70 | |
| Chondroitin sulfate proteoglygan | |
| NG2 | |
| EphA2 | |
| Folate receptor 1 | U.S. Pat. No. 5,547,668 |
| gastrin receptor | |
| GPNMB (human gylcoprotein) | |
| NMB (osteoactivin) | |
| GRP receptor subtype | |
| integrin avb3 | US20110166072 |
| LHRHR | US20110104074 |
| LRP receptor | |
| LyP-1 receptor | |
| Nectin-4 | |
| Neurotensin receptor | U.S. Pat. No. 8,058,230 |
| Nucleolin | |
| Somatostatin receptor | |
| TIM1 | |
| VPAC1 | |
| VPAC2 | |
| Alpha-MSH receptor | |
| CD25 | |
| Interleukin-1 receptor | |

[0413] In particular embodiments, the invention provides XTEN-payload conjugates comprising one, two or more targeting components and one, two or more drug components conjugated to XTEN. Non-limiting embodiments of specific conjugate compositions are provided in Table 21, in which the named composition of column 2 has specified components of: i) XTEN sequences of Table 3 designated in the XTEN column of the Table; ii) targeting moiety payloads specified in the Targeting Moiety column of the Table that provide targeting capability of the composition (with the number of moieties specified; e.g., 1× or 3×); and iii) drug pharmacophore specified in the Drug Moiety column of the Table (with the number of drug molecules conjugated to the XTEN; e.g., 3× or 9×). As would be appreciated by one of skill in the art, the invention contemplates other combinations of the disclosed components, as well as different numbers or ratios of the respective specified components, as well as different XTEN sequences to which the payloads are conjugated. For example, the invention contemplates that the number of drug moieties attached to a given XTEN can be 1, or 2, or 3, or 4, or 5, or 6, or 7, or 8, or 9, or 10 or more and that the XTEN would have, for example, the corresponding number of cysteine or lysine residues to which the drug moieties would be conjugated. Further, the invention contemplates that the number of targeting moieties attached to the conjugate can be 1, or 2, or 3 or more, which would similarly be linked to XTEN with an N-terminal amino group or a corresponding number of lysine or cysteine residues.

TABLE 21
Exemplary conjugates

| | | XTEN | XTEN | | |
|---|---|---|---|---|---|
| | | linked to | linked to | | |
| | | Targeting | Drug | Targeting | Drug |
| Conjugate | Conjugate Name* | Moiety** | Moiety** | Moiety* | Moiety* |
| 1 | 1xLHRH-XTEN-3xDox | Seg 174 | | 1xLHRH | 3xDoxorubicin |
| 2 | 1xLHRH-XTEN-9xDox | Seg 175 | | 1xLHRH | 9xDoxorubicin |
| 3 | 3xLHRH-XTEN-3xDox | Seg 176 | Seg 176 | 3xLHRH | 3xDoxorubicin |
| 4 | 3xLHRH-XTEN-9xDox | Seg 176 | Seg 177 | 3xLHRH | 9xDoxorubicin |
| 5 | XTEN-3xDox | Seg 174 | | | 3xDoxorubicin |
| 6 | XTEN-9xDox | Seg 175 | | | 9xDoxorubicin |
| 7 | 1xLHRH-XTEN-3xMMAE | Seg 174 | | 1xLHRH | 3xMMAE |
| | | | | | *** |
| 8 | 1xLHRH-XTEN-9xMMAE | Seg 175 | | 1xLHRH | 9xMMAE |
| 9 | 3xLHRH-XTEN-3xMMAE | Seg 176 | Seg 176 | 3xLHRH | 3xMMAE |
| 10 | 3xLHRH-XTEN-9xMMAE | Seg 176 | Seg 177 | 3xLHRH | 9xMMAE |
| 11 | XTEN-3xMMAE | Seg 174 | | | 3xMMAE |
| 12 | XTEN-9xMMAE | Seg 175 | | | 9xMMAE |
| 13 | 1xLHRH-XTEN-3xMMAF | Seg 174 | | 1xLHRH | 3xMMAF |
| | | | | | **** |
| 14 | 1xLHRH-XTEN-9xMMAF | Seg 175 | | 1xLHRH | 9xMMAF |
| 15 | 3xLHRH-XTEN-3xMMAF | Seg 176 | Seg 176 | 3xLHRH | 3xMMAF |
| 16 | 3xLHRH-XTEN-9xMMAF | Seg 176 | Seg 177 | 3xLHRH | 9xMMAF |
| 17 | XTEN-3xMMAF | Seg 174 | | | 3xMMAF |
| 18 | XTEN-9xMMAF | Seg 175 | | | 9xMMAF |
| 19 | 1xLHRH-XTEN- | Seg 174 | | 1xLHRH | 3xMertansine |
| | 3xMertansine | | | | |
| 20 | 1xLHRH-XTEN- | Seg 175 | | 1xLHRH | 9xMertansine |
| | 9xMertansine | | | | |
| 21 | 3xLHRH-XTEN- | Seg 176 | Seg 176 | 3xLHRH | 3xMertansine |
| | 3xMertansine | | | | |
| 22 | 3xLHRH-XTEN- | Seg 176 | Seg 177 | 3xLHRH | 9xMertansine |
| | 9xMertansine | | | | |
| 23 | XTEN-3xMertansine | Seg 174 | | | 3xMertansine |
| 24 | XTEN-9xMertansine | Seg 175 | | | 9xMertansine |
| 25 | 1xLHRH-XTEN- | Seg 174 | | 1xLHRH | 3xMaytansinoid |
| | 3xMaytansinoid DM4 | | | | DM4 |
| 26 | 1xLHRH-XTEN- | Seg 175 | | 1xLHRH | 9xMaytansinoid |
| | 9xMaytansinoid DM4 | | | | DM4 |
| 27 | 3xLHRH-XTEN- | Seg 176 | Seg 176 | 3xLHRH | 3xMaytansinoid |
| | 3xMaytansinoid DM4 | | | | DM4 |
| 28 | 3xLHRH-XTEN- | Seg 176 | Seg 177 | 3xLHRH | 9xMaytansinoid |
| | 9xMaytansinoid DM4 | | | | DM4 |
| 29 | XTEN-3xMaytansinoid | Seg 174 | | | 3xMaytansinoid |
| | DM4 | | | | DM4 |
| 30 | XTEN-9xMaytansinoid | Seg 175 | | | 9xMaytansinoid |
| | DM4 | | | | DM4 |
| 31 | 1xLHRH-XTEN- | Seg 174 | | 1xLHRH | 3xPaclitaxel |
| | 3xPaclitaxel | | | | |
| 32 | 1xLHRH-XTEN- | Seg 175 | | 1xLHRH | 9xPaclitaxel |
| | 9xPaclitaxel | | | | |
| 33 | 3xLHRH-XTEN- | Seg 176 | Seg 176 | 3xLHRH | 3xPaclitaxel |
| | 3xPaclitaxel | | | | |
| 34 | 3xLHRH-XTEN- | Seg 176 | Seg 177 | 3xLHRH | 9xPaclitaxel |
| | 9xPaclitaxel | | | | |
| 35 | XTEN-3xPaclitaxel | Seg 174 | | | 3xPaclitaxel |
| 36 | XTEN-9xPaclitaxel | Seg 175 | | | 9xPaclitaxel |
| 37 | 1xLHRH-XTEN-3xSN-38 | Seg 174 | | 1xLHRH | 3xSN-38 |
| 38 | 1xLHRH-XTEN-9xSN-38 | Seg 175 | | 1xLHRH | 9xSN-38 |
| 39 | 3xLHRH-XTEN-3xSN-38 | Seg 176 | Seg 176 | 3xLHRH | 3xSN-38 |
| 40 | 3xLHRH-XTEN-9xSN-38 | Seg 176 | Seg 177 | 3xLHRH | 9xSN-38 |
| 41 | XTEN-3xSN-38 | Seg 174 | | | 3xSN-38 |
| 42 | XTEN-9xSN-38 | Seg 175 | | | 9xSN-38 |
| 43 | 1xLHRH-XTEN- | Seg 174 | | 1xLHRH | 3xGemcitabine |
| | 3xGemcitabine | | | | |
| 44 | 1xLHRH-XTEN- | Seg 175 | | 1xLHRH | 9xGemcitabine |
| | 9xGemcitabine | | | | |
| 45 | 3xLHRH-XTEN- | Seg 176 | Seg 176 | 3xLHRH | 3xGemcitabine |
| | 3xGemcitabine | | | | |
| 46 | 3xLHRH-XTEN- | Seg 176 | Seg 177 | 3xLHRH | 9xGemcitabine |
| | 9xGemcitabine | | | | |
| 47 | XTEN-3xGemcitabine | Seg 174 | | | 3xGemcitabine |
| 48 | XTEN-9xGemcitabine | Seg 175 | | | 9xGemcitabine |
| 49 | 1xLHRH-XTEN- | Seg 174 | | 1xLHRH | 3xCarboplatin |
| | 3xCarboplatin | | | | |
| 50 | 1xLHRH-XTEN- | Seg 175 | | 1xLHRH | 9xCarboplatin |
| | 9xCarboplatin | | | | |
| 51 | 3xLHRH-XTEN- | Seg 176 | Seg 176 | 3xLHRH | 3xCarboplatin |
| | 3xCarboplatin | | | | |
| 52 | 3xLHRH-XTEN- | Seg 176 | Seg 177 | 3xLHRH | 9xCarboplatin |
| | 9xCarboplatin | | | | |
| 53 | XTEN-3xCarboplatin | Seg 174 | | | 3xCarboplatin |
| 54 | XTEN-9xCarboplatin | Seg 175 | | | 9xCarboplatin |
| 55 | 1xLHRH-XTEN-Human | | | 1xLHRH | Human |
| | RNase | | | | RNase |
| 56 | 3xLHRH-XTEN-Human | | | 3xLHRH | Human |
| | RNase | | | | RNase |
| 57 | 1xLHRH-XTEN-Bovine | | | 1xLHRH | Bovine |
| | RNase | | | | RNase |
| 58 | 3xLHRH-XTEN-Bovine | | | 3xLHRH | Bovine |
| | RNase | | | | RNase |
| 59 | 1xLHRH-XTEN-Ranpirnase | | | 1xLHRH | Ranpirnase |
| 60 | 3xLHRH-XTEN-Ranpirnase | | | 3xLHRH | Ranpirnase |
| 61 | 1xLHRH-XTEN-Pokeweed antiviral protein | | | 1xLHRH | Pokeweed |
| | | | | | antiviral protein |
| 62 | 3xLHRH-XTEN-Pokeweed antiviral protein | | | 3xLHRH | Pokeweed |
| | | | | | antiviral protein |
| 63 | 1xfolate-XTEN-3xDox | Seg 174 | | 1xfolate | 3xDoxorubicin |
| 64 | 1xfolate-XTEN-9xDox | Seg 175 | | 1xfolate | 9xDoxorubicin |
| 65 | 3xfolate-XTEN-3xDox | Seg 176 | Seg 176 | 3xfolate | 3xDoxorubicin |
| 66 | 3xfolate-XTEN-9xDox | Seg 176 | Seg 177 | 3xfolate | 9xDoxorubicin |
| 67 | XTEN-3xDox | Seg 174 | | | 3xDoxorubicin |
| 68 | XTEN-9xDox | Seg 175 | | | 9xDoxorubicin |
| 69 | 1xfolate-XTEN-3xMMAE | Seg 174 | | 1xfolate | 3xMMAE |
| 70 | 1xfolate-XTEN-9xMMAE | Seg 175 | | 1xfolate | 9xMMAE |
| 71 | 3xfolate-XTEN-3xMMAE | Seg 176 | Seg 176 | 3xfolate | 3xMMAE |
| 72 | 3xfolate-XTEN-9xMMAE | Seg 176 | Seg 177 | 3xfolate | 9xMMAE |
| 73 | XTEN-3xMMAE | Seg 174 | | | 3xMMAE |
| 74 | XTEN-9xMMAE | Seg 175 | | | 9xMMAE |
| 75 | 1xfolate-XTEN-3xMMAF | Seg 174 | | 1xfolate | 3xMMAF |
| 76 | 1xfolate-XTEN-9xMMAF | Seg 175 | | 1xfolate | 9xMMAF |
| 77 | 3xfolate-XTEN-3xMMAF | Seg 176 | Seg 176 | 3xfolate | 3xMMAF |
| 78 | 3xfolate-XTEN-9xMMAF | Seg 176 | Seg 177 | 3xfolate | 9xMMAF |
| 79 | XTEN-3xMMAF | Seg 174 | | | 3xMMAF |
| 80 | XTEN-9xMMAF | Seg 175 | | | 9xMMAF |
| 81 | 1xfolate-XTEN-3xMertansine | Seg 174 | | 1xfolate | 3xMertansine |
| 82 | 1xfolate-XTEN-9xMertansine | Seg 175 | | 1xfolate | 9xMertansine |
| 83 | 3xfolate-XTEN-3xMertansine | Seg 176 | Seg 176 | 3xfolate | 3xMertansine |
| 84 | 3xfolate-XTEN-9xMertansine | Seg 176 | Seg 177 | 3xfolate | 9xMertansine |
| 85 | XTEN-3xMertansine | Seg 174 | | | 3xMertansine |
| 86 | XTEN-9xMertansine | Seg 175 | | | 9xMertansine |
| 87 | 1xfolate-XTEN- | Seg 174 | | 1xfolate | 3xMaytansinoid |
| | 3xMaytansinoid DM4 | | | | DM4 |
| 88 | 1xfolate-XTEN- | Seg 175 | | 1xfolate | 9xMaytansinoid |
| | 9xMaytansinoid DM4 | | | | DM4 |
| 89 | 3xfolate-XTEN- | Seg 176 | Seg 176 | 3xfolate | 3xMaytansinoid |
| | 3xMaytansinoid DM4 | | | | DM4 |
| 90 | 3xfolate-XTEN- | Seg 176 | Seg 177 | 3xfolate | 9xMaytansinoid |
| | 9xMaytansinoid DM4 | | | | DM4 |
| 91 | XTEN-3xMaytansinoid DM4 | Seg 174 | | | 3xMaytansinoid |
| | | | | | DM4 |
| 92 | XTEN-9xMaytansinoid DM4 | Seg 175 | | | 9xMaytansinoid |
| | | | | | DM4 |
| 93 | 1xfolate-XTEN-3xPaclitaxel | Seg 174 | | 1xfolate | 3xPaclitaxel |
| 94 | 1xfolate-XTEN-9xPaclitaxel | Seg 175 | | 1xfolate | 9xPaclitaxel |
| 95 | 3xfolate-XTEN-3xPaclitaxel | Seg 176 | Seg 176 | 3xfolate | 3xPaclitaxel |
| 96 | 3xfolate-XTEN-9xPaclitaxel | Seg 176 | Seg 177 | 3xfolate | 9xPaclitaxel |
| 97 | XTEN-3xPaclitaxel | Seg 174 | | | 3xPaclitaxel |
| 98 | XTEN-9xPaclitaxel | Seg 175 | | | 9xPaclitaxel |
| 99 | 1xfolate-XTEN-3xSN-38 | Seg 174 | | 1xfolate | 3xSN-38 |
| 100 | 1xfolate-XTEN-9xSN-38 | Seg 175 | | 1xfolate | 9xSN-38 |
| 101 | 3xfolate-XTEN-3xSN-38 | Seg 176 | Seg 176 | 3xfolate | 3xSN-38 |
| 102 | 3xfolate-XTEN-9xSN-38 | Seg 176 | Seg 177 | 3xfolate | 9xSN-38 |
| 103 | XTEN-3xSN-38 | Seg 174 | | | 3xSN-38 |
| 104 | XTEN-9xSN-38 | Seg 175 | | | 9xSN-38 |
| 105 | 1xfolate-XTEN- | Seg 174 | | 1xfolate | 3xGemcitabine |
| | 3xGemcitabine | | | | |
| 106 | 1xfolate-XTEN- | Seg 175 | | 1xfolate | 9xGemcitabine |
| | 9xGemcitabine | | | | |
| 107 | 3xfolate-XTEN- | Seg 176 | Seg 176 | 3xfolate | 3xGemcitabine |
| | 3xGemcitabine | | | | |
| 108 | 3xfolate-XTEN- | Seg 176 | Seg 177 | 3xfolate | 9xGemcitabine |
| | 9xGemcitabine | | | | |
| 109 | XTEN-3xGemcitabine | Seg 174 | | | 3xGemcitabine |
| 110 | XTEN-9xGemcitabine | Seg 175 | | | 9xGemcitabine |
| 111 | 1xfolate-XTEN-3xCarboplatin | Seg 174 | | 1xfolate | 3xCarboplatin |
| 112 | 1xfolate-XTEN-9xCarboplatin | Seg 175 | | 1xfolate | 9xCarboplatin |
| 113 | 3xfolate-XTEN-3xCarboplatin | Seg 176 | Seg 176 | 3xfolate | 3xCarboplatin |
| 114 | 3xfolate-XTEN-9xCarboplatin | Seg 176 | Seg 177 | 3xfolate | 9xCarboplatin |
| 115 | XTEN-3xCarboplatin | Seg 174 | | | 3xCarboplatin |
| 116 | XTEN-9xCarboplatin | Seg 175 | | | 9xCarboplatin |
| 117 | 1xoctreotide-XTEN-3xDox | Seg 174 | | 1xoctreotide | 3xDoxorubicin |
| 118 | 1xoctreotide-XTEN-9xDox | Seg 175 | | 1xoctreotide | 9xDoxorubicin |
| 119 | 3xoctreotide-XTEN-3xDox | Seg 176 | Seg 176 | 3xoctreotide | 3xDoxorubicin |
| 120 | 3xoctreotide-XTEN-9xDox | Seg 176 | Seg 177 | 3xoctreotide | 9xDoxorubicin |
| 121 | XTEN-3xDox | Seg 174 | | | 3xDoxorubicin |
| 122 | XTEN-9xDox | Seg 175 | | | 9xDoxorubicin |
| 123 | 1xoctreotide-XTEN-3xMMAE | Seg 174 | | 1xoctreotide | 3xMMAE |
| 124 | 1xoctreotide-XTEN-9xMMAE | Seg 175 | | 1xoctreotide | 9xMMAE |
| 125 | 3xoctreotide-XTEN-3xMMAE | Seg 176 | Seg 176 | 3xoctreotide | 3xMMAE |
| 126 | 3xoctreotide-XTEN-9xMMAE | Seg 176 | Seg 177 | 3xoctreotide | 9xMMAE |
| 127 | XTEN-3xMMAE | Seg 174 | | | 3xMMAE |
| 128 | XTEN-9xMMAE | Seg 175 | | | 9xMMAE |
| 129 | 1xoctreotide-XTEN-3xMMAF | Seg 174 | | 1xoctreotide | 3xMMAF |
| 130 | 1xoctreotide-XTEN-9xMMAF | Seg 175 | | 1xoctreotide | 9xMMAF |
| 131 | 3xoctreotide-XTEN-3xMMAF | Seg 176 | Seg 176 | 3xoctreotide | 3xMMAF |
| 132 | 3xoctreotide-XTEN-9xMMAF | Seg 176 | Seg 177 | 3xoctreotide | 9xMMAF |
| 133 | XTEN-3xMMAF | Seg 174 | | | 3xMMAF |
| 134 | XTEN-9xMMAF | Seg 175 | | | 9xMMAF |
| 135 | 1xoctreotide-XTEN- | Seg 174 | | 1xoctreotide | 3xMertansine |
| | 3xMertansine | | | | |
| 136 | 1xoctreotide-XTEN- | Seg 175 | | 1xoctreotide | 9xMertansine |
| | 9xMertansine | | | | |
| 137 | 3xoctreotide-XTEN- | Seg 176 | Seg 176 | 3xoctreotide | 3xMertansine |
| | 3xMertansine | | | | |
| 138 | 3xoctreotide-XTEN- | Seg 176 | Seg 177 | 3xoctreotide | 9xMertansine |
| | 9xMertansine | | | | |
| 139 | XTEN-3xMertansine | Seg 174 | | | 3xMertansine |
| 140 | XTEN-9xMertansine | Seg 175 | | | 9xMertansine |
| 141 | 1xoctreotide-XTEN- | Seg 174 | | 1xoctreotide | 3xMaytansinoid |
| | 3xMaytansinoid DM4 | | | | DM4 |
| 142 | 1xoctreotide-XTEN- | Seg 175 | | 1xoctreotide | 9xMaytansinoid |
| | 9xMaytansinoid DM4 | | | | DM4 |
| 143 | 3xoctreotide-XTEN- | Seg 176 | Seg 176 | 3xoctreotide | 3xMaytansinoid |
| | 3xMaytansinoid DM4 | | | | DM4 |
| 144 | 3xoctreotide-XTEN- | Seg 176 | Seg 177 | 3xoctreotide | 9xMaytansinoid |
| | 9xMaytansinoid DM4 | | | | DM4 |
| 145 | XTEN-3xMaytansinoid DM4 | Seg 174 | | | 3xMaytansinoid |
| | | | | | DM4 |
| 146 | XTEN-9xMaytansinoid DM4 | Seg 175 | | | 9xMaytansinoid |
| | | | | | DM4 |
| 147 | 1xoctreotide-XTEN- | Seg 174 | | 1xoctreotide | 3xPaclitaxel |
| | 3xPaclitaxel | | | | |
| 148 | 1xoctreotide-XTEN- | Seg 175 | | 1xoctreotide | 9xPaclitaxel |
| | 9xPaclitaxel | | | | |
| 149 | 3xoctreotide-XTEN- | Seg 176 | Seg 176 | 3xoctreotide | 3xPaclitaxel |
| | 3xPaclitaxel | | | | |
| 150 | 3xoctreotide-XTEN- | Seg 176 | Seg 177 | 3xoctreotide | 9xPaclitaxel |
| | 9xPaclitaxel | | | | |
| 151 | XTEN-3xPaclitaxel | Seg 174 | | | 3xPaclitaxel |
| 152 | XTEN-9xPaclitaxel | Seg 175 | | | 9xPaclitaxel |
| 153 | 1xoctreotide-XTEN-3xSN-38 | Seg 174 | | 1xoctreotide | 3xSN-38 |
| 154 | 1xoctreotide-XTEN-9xSN-38 | Seg 175 | | 1xoctreotide | 9xSN-38 |
| 155 | 3xoctreotide-XTEN-3xSN-38 | Seg 176 | Seg 176 | 3xoctreotide | 3xSN-38 |
| 156 | 3xoctreotide-XTEN-9xSN-38 | Seg 176 | Seg 177 | 3xoctreotide | 9xSN-38 |
| 157 | XTEN-3xSN-38 | Seg 174 | | | 3xSN-38 |
| 158 | XTEN-9xSN-38 | Seg 175 | | | 9xSN-38 |
| 159 | 1xoctreotide-XTEN- | Seg 174 | | 1xoctreotide | 3xGemcitabine |
| | 3xGemcitabine | | | | |
| 160 | 1xoctreotide-XTEN- | Seg 175 | | 1xoctreotide | 9xGemcitabine |
| | 9xGemcitabine | | | | |
| 161 | 3xoctreotide-XTEN- | Seg 176 | Seg 176 | 3xoctreotide | 3xGemcitabine |
| | 3xGemcitabine | | | | |
| 162 | 3xoctreotide-XTEN- | Seg 176 | Seg 177 | 3xoctreotide | 9xGemcitabine |
| | 9xGemcitabine | | | | |
| 163 | XTEN-3xGemcitabine | Seg 174 | | | 3xGemcitabine |
| 164 | XTEN-9xGemcitabine | Seg 175 | | | 9xGemcitabine |
| 165 | 1xoctreotide-XTEN- | Seg 174 | | 1xoctreotide | 3xCarboplatin |
| | 3xCarboplatin | | | | |
| 166 | 1xoctreotide-XTEN- | Seg 175 | | 1xoctreotide | 9xCarboplatin |
| | 9xCarboplatin | | | | |
| 167 | 3xoctreotide-XTEN- | Seg 176 | Seg 176 | 3xoctreotide | 3xCarboplatin |
| | 3xCarboplatin | | | | |
| 168 | 3xoctreotide-XTEN- | Seg 176 | Seg 177 | 3xoctreotide | 9xCarboplatin |
| | 9xCarboplatin | | | | |
| 169 | XTEN-3xCarboplatin | Seg 174 | | | 3xCarboplatin |
| 170 | XTEN-9xCarboplatin | Seg 175 | | | 9xCarboplatin |
| 171 | 1xoctreotide-XTEN- | Seg 174 | | 1xoctreotide | 3xEverolimus |
| | 3xEverolimus | | | | |
| 172 | 1xoctreotide-XTEN- | Seg 175 | | 1xoctreotide | 9xEverolimus |
| | 9xEverolimus | | | | |
| 173 | 3xoctreotide-XTEN- | Seg 176 | Seg 176 | 3xoctreotide | 3xEverolimus |
| | 3xEverolimus | | | | |
| 174 | 3xoctreotide-XTEN- | Seg 176 | Seg 177 | 3xoctreotide | 9xEverolimus |
| | 9xEverolimus | | | | |
| 175 | XTEN-3xEverolimus | Seg 174 | | | 3xEverolimus |
| 176 | XTEN-9xEverolimus | Seg 175 | | | 9xEverolimus |
| 177 | 1xpasireotide-XTEN-3xDox | Seg 174 | | 1xpasireotide | 3xDoxorubicin |
| 178 | 1xpasireotide-XTEN-9xDox | Seg 175 | | 1xpasireotide | 9xDoxorubicin |
| 179 | 3xpasireotide-XTEN-3xDox | Seg 176 | Seg 176 | 3xpasireotide | 3xDoxorubicin |
| 180 | 3xpasireotide-XTEN-9xDox | Seg 176 | Seg 177 | 3xpasireotide | 9xDoxorubicin |
| 181 | XTEN-3xDox | Seg 174 | | | 3xDoxorubicin |
| 182 | XTEN-9xDox | Seg 175 | | | 9xDoxorubicin |
| 183 | 1xpasireotide-XTEN- | Seg 174 | | 1xpasireotide | 3xMMAE |
| | 3xMMAE | | | | |
| 184 | 1xpasireotide-XTEN- | Seg 175 | | 1xpasireotide | 9xMMAE |
| | 9xMMAE | | | | |
| 185 | 3xpasireotide-XTEN- | Seg 176 | Seg 176 | 3xpasireotide | 3xMMAE |
| | 3xMMAE | | | | |
| 186 | 3xpasireotide-XTEN- | Seg 176 | Seg 177 | 3xpasireotide | 9xMMAE |
| | 9xMMAE | | | | |
| 187 | XTEN-3xMMAE | Seg 174 | | | 3xMMAE |
| 188 | XTEN-9xMMAE | Seg 175 | | | 9xMMAE |
| 189 | 1xpasireotide-XTEN- | Seg 174 | | 1xpasireotide | 3xMMAF |
| | 3xMMAF | | | | |
| 190 | 1xpasireotide-XTEN- | Seg 175 | | 1xpasireotide | 9xMMAF |
| | 9xMMAF | | | | |
| 191 | 3xpasireotide-XTEN- | Seg 176 | Seg 176 | 3xpasireotide | 3xMMAF |
| | 3xMMAF | | | | |
| 192 | 3xpasireotide-XTEN- | Seg 176 | Seg 177 | 3xpasireotide | 9xMMAF |
| | 9xMMAF | | | | |
| 193 | XTEN-3xMMAF | Seg 174 | | | 3xMMAF |
| 194 | XTEN-9xMMAF | Seg 175 | | | 9xMMAF |
| 195 | 1xpasireotide-XTEN- | Seg 174 | | 1xpasireotide | 3xMertansine |
| | 3xMertansine | | | | |
| 196 | 1xpasireotide-XTEN- | Seg 175 | | 1xpasireotide | 9xMertansine |
| | 9xMertansine | | | | |
| 197 | 3xpasireotide-XTEN- | Seg 176 | Seg 176 | 3xpasireotide | 3xMertansine |
| | 3xMertansine | | | | |
| 198 | 3xpasireotide-XTEN- | Seg 176 | Seg 177 | 3xpasireotide | 9xMertansine |
| | 9xMertansine | | | | |
| 199 | XTEN-3xMertansine | Seg 174 | | | 3xMertansine |
| 200 | XTEN-9xMertansine | Seg 175 | | | 9xMertansine |
| 201 | 1xpasireotide-XTEN- | Seg 174 | | 1xpasireotide | 3xMaytansinoid |
| | 3xMaytansinoid DM4 | | | | DM4 |
| 202 | 1xpasireotide-XTEN- | Seg 175 | | 1xpasireotide | 9xMaytansinoid |
| | 9xMaytansinoid DM4 | | | | DM4 |
| 203 | 3xpasireotide-XTEN- | Seg 176 | Seg 176 | 3xpasireotide | 3xMaytansinoid |
| | 3xMaytansinoid DM4 | | | | DM4 |
| 204 | 3xpasireotide-XTEN- | Seg 176 | Seg 177 | 3xpasireotide | 9xMaytansinoid |
| | 9xMaytansinoid DM4 | | | | DM4 |
| 205 | -XTEN-3xMaytansinoid DM4 | Seg 174 | | | 3xMaytansinoid |
| | | | | | DM4 |
| 206 | -XTEN-9xMaytansinoid DM4 | Seg 175 | | | 9xMaytansinoid |
| | | | | | DM4 |
| 207 | 1xpasireotide-XTEN- | Seg 174 | | 1xpasireotide | 3xPaclitaxel |
| | 3xPaclitaxel | | | | |
| 208 | 1xpasireotide-XTEN- | Seg 175 | | 1xpasireotide | 9xPaclitaxel |
| | 9xPaclitaxel | | | | |
| 209 | 3xpasireotide-XTEN- | Seg 176 | Seg 176 | 3xpasireotide | 3xPaclitaxel |
| | 3xPaclitaxel | | | | |
| 210 | 3xpasireotide-XTEN- | Seg 176 | Seg 177 | 3xpasireotide | 9xPaclitaxel |
| | 9xPaclitaxel | | | | |
| 211 | XTEN-3xPaclitaxel | Seg 174 | | | 3xPaclitaxel |
| 212 | XTEN-9xPaclitaxel | Seg 175 | | | 9xPaclitaxel |
| 213 | 1xpasireotide-XTEN-3xSN-38 | Seg 174 | | 1xpasireotide | 3xSN-38 |
| 214 | 1xpasireotide-XTEN-9xSN-38 | Seg 175 | | 1xpasireotide | 9xSN-38 |
| 215 | 3xpasireotide-XTEN-3xSN-38 | Seg 176 | Seg 176 | 3xpasireotide | 3xSN-38 |
| 216 | 3xpasireotide-XTEN-9xSN-38 | Seg 176 | Seg 177 | 3xpasireotide | 9xSN-38 |
| 217 | XTEN-3xSN-38 | Seg 174 | | | 3xSN-38 |
| 218 | XTEN-9xSN-38 | Seg 175 | | | 9xSN-38 |
| 219 | 1xpasireotide-XTEN- | Seg 174 | | 1xpasireotide | 3xGemcitabine |
| | 3xGemcitabine | | | | |
| 220 | 1xpasireotide-XTEN- | Seg 175 | | 1xpasireotide | 9xGemcitabine |
| | 9xGemcitabine | | | | |
| 221 | 3xpasireotide-XTEN- | Seg 176 | Seg 176 | 3xpasireotide | 3xGemcitabine |
| | 3xGemcitabine | | | | |
| 222 | 3xpasireotide-XTEN- | Seg 176 | Seg 177 | 3xpasireotide | 9xGemcitabine |
| | 9xGemcitabine | | | | |
| 223 | -XTEN-3xGemcitabine | Seg 174 | | | 3xGemcitabine |
| 224 | -XTEN-9xGemcitabine | Seg 175 | | | 9xGemcitabine |
| 225 | 1xpasireotide-XTEN- | Seg 174 | | 1xpasireotide | 3xCarboplatin |
| | 3xCarboplatin | | | | |
| 226 | 1xpasireotide-XTEN- | Seg 175 | | 1xpasireotide | 9xCarboplatin |
| | 9xCarboplatin | | | | |
| 227 | 3xpasireotide-XTEN- | Seg 176 | Seg 176 | 3xpasireotide | 3xCarboplatin |
| | 3xCarboplatin | | | | |
| 228 | 3xpasireotide-XTEN- | Seg 176 | Seg 177 | 3xpasireotide | 9xCarboplatin |
| | 9xCarboplatin | | | | |
| 229 | -XTEN-3xCarboplatin | Seg 174 | | | 3xCarboplatin |
| 230 | -XTEN-9xCarboplatin | Seg 175 | | | 9xCarboplatin |
| 231 | 1xpasireotide-XTEN- | Seg 174 | | 1xpasireotide | 3xEverolimus |
| | 3xEverolimus | | | | |
| 232 | 1xpasireotide-XTEN- | Seg 175 | | 1xpasireotide | 9xEverolimus |
| | 9xEverolimus | | | | |
| 233 | 3xpasireotide-XTEN- | Seg 176 | Seg 176 | 3xpasireotide | 3xEverolimus |
| | 3xEverolimus | | | | |
| 234 | 3xpasireotide-XTEN- | Seg 176 | Seg 177 | 3xpasireotide | 9xEverolimus |
| | 9xEverolimus | | | | |
| 235 | XTEN-3xEverolimus | Seg 174 | | | 3xEverolimus |
| 236 | XTEN-9xEverolimus | Seg 175 | | | 9xEverolimus |
| 237 | 1xbombesin-XTEN-3xDox | Seg 174 | | 1xbombesin | 3xDoxorubicin |
| 238 | 1xbombesin-XTEN-9xDox | Seg 175 | | 1xbombesin | 9xDoxorubicin |
| 239 | 3xbombesin-XTEN-3xDox | Seg 176 | Seg 176 | 3xbombesin | 3xDoxorubicin |
| 240 | 3xbombesin-XTEN-9xDox | Seg 176 | Seg 177 | 3xbombesin | 9xDoxorubicin |
| 241 | XTEN-3xDox | Seg 174 | | | 3xDoxorubicin |
| 242 | XTEN-9xDox | Seg 175 | | | 9xDoxorubicin |
| 243 | 1xbombesin-XTEN-3xMMAE | Seg 174 | | 1xbombesin | 3xMMAE |
| 244 | 1xbombesin-XTEN-9xMMAE | Seg 175 | | 1xbombesin | 9xMMAE |
| 245 | 3xbombesin-XTEN-3xMMAE | Seg 176 | Seg 176 | 3xbombesin | 3xMMAE |
| 246 | 3xbombesin-XTEN-9xMMAE | Seg 176 | Seg 177 | 3xbombesin | 9xMMAE |
| 247 | XTEN-3xMMAE | Seg 174 | | | 3xMMAE |
| 248 | XTEN-9xMMAE | Seg 175 | | | 9xMMAE |
| 249 | 1xbombesin-XTEN-3xMMAF | Seg 174 | | 1xbombesin | 3xMMAF |
| 250 | 1xbombesin-XTEN-9xMMAF | Seg 175 | | 1xbombesin | 9xMMAF |
| 251 | 3xbombesin-XTEN-3xMMAF | Seg 176 | Seg 176 | 3xbombesin | 3xMMAF |
| 252 | 3xbombesin-XTEN-9xMMAF | Seg 176 | Seg 177 | 3xbombesin | 9xMMAF |
| 253 | XTEN-3xMMAF | Seg 174 | | | 3xMMAF |
| 254 | XTEN-9xMMAF | Seg 175 | | | 9xMMAF |
| 255 | 1xbombesin-XTEN- | Seg 174 | | 1xbombesin | 3xMertansine |
| | 3xMertansine | | | | |
| 256 | 1xbombesin-XTEN- | Seg 175 | | 1xbombesin | 9xMertansine |
| | 9xMertansine | | | | |
| 257 | 3xbombesin-XTEN- | Seg 176 | Seg 176 | 3xbombesin | 3xMertansine |
| | 3xMertansine | | | | |
| 258 | 3xbombesin-XTEN- | Seg 176 | Seg 177 | 3xbombesin | 9xMertansine |
| | 9xMertansine | | | | |
| 259 | XTEN-3xMertansine | Seg 174 | | | 3xMertansine |
| 260 | XTEN-9xMertansine | Seg 175 | | | 9xMertansine |
| 261 | 1xbombesin-XTEN- | Seg 174 | | 1xbombesin | 3xMaytansinoid |
| | 3xMaytansinoid DM4 | | | | DM4 |
| 262 | 1xbombesin-XTEN- | Seg 175 | | 1xbombesin | 9xMaytansinoid |
| | 9xMaytansinoid DM4 | | | | DM4 |
| 263 | 3xbombesin-XTEN- | Seg 176 | Seg 176 | 3xbombesin | 3xMaytansinoid |
| | 3xMaytansinoid DM4 | | | | DM4 |
| 264 | 3xbombesin-XTEN- | Seg 176 | Seg 177 | 3xbombesin | 9xMaytansinoid |
| | 9xMaytansinoid DM4 | | | | DM4 |
| 265 | XTEN-3xMaytansinoid DM4 | Seg 174 | | | 3xMaytansinoid |
| | | | | | DM4 |
| 266 | XTEN-9xMaytansinoid DM4 | Seg 175 | | | 9xMaytansinoid |
| | | | | | DM4 |
| 267 | 1xbombesin-XTEN- | Seg 174 | | 1xbombesin | 3xPaclitaxel |
| | 3xPaclitaxel | | | | |
| 268 | 1xbombesin-XTEN- | Seg 175 | | 1xbombesin | 9xPaclitaxel |
| | 9xPaclitaxel | | | | |
| 269 | 3xbombesin-XTEN- | Seg 176 | Seg 176 | 3xbombesin | 3xPaclitaxel |
| | 3xPaclitaxel | | | | |
| 270 | 3xbombesin-XTEN- | Seg 176 | Seg 177 | 3xbombesin | 9xPaclitaxel |
| | 9xPaclitaxel | | | | |
| 271 | XTEN-3xPaclitaxel | Seg 174 | | | 3xPaclitaxel |
| 272 | XTEN-9xPaclitaxel | Seg 175 | | | 9xPaclitaxel |
| 273 | 1xbombesin-XTEN-3xSN-38 | Seg 174 | | 1xbombesin | 3xSN-38 |
| 274 | 1xbombesin-XTEN-9xSN-38 | Seg 175 | | 1xbombesin | 9xSN-38 |
| 275 | 3xbombesin-XTEN-3xSN-38 | Seg 176 | Seg 176 | 3xbombesin | 3xSN-38 |
| 276 | 3xbombesin-XTEN-9xSN-38 | Seg 176 | Seg 177 | 3xbombesin | 9xSN-38 |
| 277 | XTEN-3xSN-38 | Seg 174 | | | 3xSN-38 |
| 278 | XTEN-9xSN-38 | Seg 175 | | | 9xSN-38 |
| 279 | 1xbombesin-XTEN- | Seg 174 | | 1xbombesin | 3xGemcitabine |
| | 3xGemcitabine | | | | |
| 280 | 1xbombesin-XTEN- | Seg 175 | | 1xbombesin | 9xGemcitabine |
| | 9xGemcitabine | | | | |
| 281 | 3xbombesin-XTEN- | Seg 176 | Seg 176 | 3xbombesin | 3xGemcitabine |
| | 3xGemcitabine | | | | |
| 282 | 3xbombesin-XTEN- | Seg 176 | Seg 177 | 3xbombesin | 9xGemcitabine |
| | 9xGemcitabine | | | | |
| 283 | XTEN-3xGemcitabine | Seg 174 | | | 3xGemcitabine |
| 284 | XTEN-9xGemcitabine | Seg 175 | | | 9xGemcitabine |
| 285 | 1xbombesin-XTEN- | Seg 174 | | 1xbombesin | 3xCarboplatin |
| | 3xCarboplatin | | | | |
| 286 | 1xbombesin-XTEN- | Seg 175 | | 1xbombesin | 9xCarboplatin |
| | 9xCarboplatin | | | | |
| 287 | 3xbombesin-XTEN- | Seg 176 | Seg 176 | 3xbombesin | 3xCarboplatin |
| | 3xCarboplatin | | | | |
| 288 | 3xbombesin-XTEN- | Seg 176 | Seg 177 | 3xbombesin | 9xCarboplatin |
| | 9xCarboplatin | | | | |

| | | | |
|---|---|---|---|
| 289 | XTEN-3xCarboplatin | Seg 174 | 3xCarboplatin |
| 290 | XTEN-9xCarboplatin | Seg 175 | 9xCarboplatin |

*1x, 3x, 9x refers to the number of the indicated moiety conjugated to the XTEN
**refers to XTEN sequence from Table 3; e.g., Seg 174
*** Monomethyl auristatin E
**** Monomethyl auristatin F

### V). Pharmaceutical Compositions

[0414] The present invention provides pharmaceutical compositions comprising XTEN-payload conjugates of the disclosure. In one embodiment, the pharmaceutical composition comprises a conjugate selected from the group consisting of the conjugates set forth in Table 21 and at least one pharmaceutically acceptable carrier. In one embodiment, the pharmaceutical composition comprises a conjugate comprising at least a first XTEN sequence having at least about 80%, or at least about 90%, or at least about 91%, or at least about 92%, or at least about 93%, or at least about 94%, or at least about 95%, or at least about 96%, or at least about 97%, or at least about 98%, or at least about 99%, or having 100% sequence identity to a sequence selected from the group of sequences set forth in Table 2 and Table 3 wherein the XTEN sequences of the composition are substantially homogeneous in length, and wherein the XTEN is conjugated to at least a first payload selected from the group of payloads set forth in Tables 11, 12, 18, 19, and 21, and wherein the composition further comprises at least one pharmaceutically acceptable carrier. In one embodiment, the invention provides a pharmaceutical composition comprising an XTEN-payload conjugate of any of the embodiments described herein and at least one pharmaceutically acceptable carrier.

[0415] The invention provides a method of preparing a pharmaceutical composition, comprising the step of combining a subject conjugate composition of the embodiments with at least one pharmaceutically acceptable carrier into a pharmaceutically acceptable formulation. The XTEN-payload conjugates of the present invention can be formulated according to known methods to prepare pharmaceutically useful compositions, whereby the XTEN-payload is combined in admixture with a pharmaceutically acceptable carrier vehicle, such as aqueous solutions or buffers, pharmaceutically acceptable suspensions and emulsions. Examples of non-aqueous solvents include propyl ethylene glycol, polyethylene glycol and vegetable oils. Therapeutic formulations are prepared for storage by mixing the active ingredient having the desired degree of purity with optional physiologically acceptable carriers, excipients or stabilizers, as described in Remington's Pharmaceutical Sciences 16th edition, Osol, A. Ed. (1980), in the form of lyophilized formulations or aqueous solutions. The pharmaceutical compositions can be administered by any suitable means or route, including subcutaneously, subcutaneously by infusion pump, intramuscularly, and intravenously. It will be appreciated that the preferred route will vary with the disease and age of the recipient, and the severity of the condition being treated. Osmotic pumps may be used as slow release agents in the form of tablets, pills, capsules or implantable devices. Syringe pumps may also be used as slow release agents. Such devices are described in U.S. Pat. Nos. 4,976,696; 4,933,185; 5,017,378; 6,309,370; 6,254,573; 4,435,173; 4,398,908; 6,572,585; 5,298,022; 5,176,502; 5,492,534; 5,318,540; and 4,988,337, the contents of which are incorporated herein by reference. One skilled in the art, considering both the disclosure of this invention and the disclosures of these other patents could produce a syringe pump for the extended release of the compositions of the present invention.

[0416] In another embodiment, the invention provides an XTEN-payload conjugate of any of the embodiments described herein for use in making a medicament useful for the treatment of a condition including, but not limited to the conditions set forth in Table 16.

### VI). Methods of Treatment

[0417] The invention provides a method of treating a disease in a subject, comprising administering to the subject an effective amount of the XTEN-payload conjugate of any of the foregoing embodiments to a subject in need thereof. In one embodiment, the XTEN-payload comprises a single type of payload selected from Tables 11, 12, 18, 19, and 21. In another embodiment, the XTEN-payload comprises a two types of payloads selected from Tables 11, 12, 18, 19, and 21. In another embodiment, the XTEN-payload comprises a two types of payloads in which one payload is selected from Tables 11, 12, and 18 and the second payload is a targeting moiety with binding affinity to a target of Table 20 or is a targeting moiety of any one of Tables 18, 19, or 21. In another embodiment, the XTEN-payload comprises more than three or more types of payloads selected from Tables 11, 12, 18, 19, and 21. In the method, the payload of the conjugate is one that is known in the art to have a beneficial effect or has affinity to a disease target when administered to a subject with a particular disease or condition. In one embodiment, the payload(s) of the composition mediate their therapeutic effect via a common biological pathway. In the foregoing embodiments of the paragraph, the method is useful in treating or ameliorating or preventing a disease selected from cancer, cancer supportive care, cardiovascular, central nervous system, endocrine disease, gastrointestinal, genitourinary, hematological, HIV infection, hormonal system, inflammation, autoimmune disease, infectious diseases, metabolic disease, musculoskeletal disease, nephrology disorders, ophthalmologic diseases, pain, and respiratory. With greater particularity, the disease is selected from Table 16.

[0418] In some embodiments of the method of treatment, the conjugate composition can be administered subcutaneously, intramuscularly, or intravenously. In one embodiment, the composition is administered using a therapeutically effective amount. In one embodiment, administration of two or more consecutive doses of the therapeutically effective amount results in a gain in time spent within a therapeutic window for the composition compared to the payload not linked to XTEN and administered using comparable doses to a subject. The gain in time spent within the therapeutic window can be at least three-fold longer than unmodified payload, or alternatively, at least four-fold, or five-fold, or six-fold, or seven-fold, or eight-fold, or nine-fold, or at least 10-fold, or at least 20-fold, or at least about 30-fold, or at least about 50-fold, or at least about 100-fold longer than payload not linked to XTEN.

[0419] In one embodiment of the method of treatment, a smaller moles/kg amount of about two-fold less, or about three-fold less, or about four-fold less, or about five-fold less, or about six-fold less, or about eight-fold less, or about 10-fold less or greater of the conjugate or a pharmaceutical composition comprising the conjugate is administered to a subject in need thereof in comparison to the corresponding payload(s) not linked to the XTEN under a dose regimen needed to maintain a therapeutic effect and the conjugate achieves a comparable area under the curve as the corresponding moles/kg amount of the payload(s) not linked to the XTEN needed to maintain a therapeutic effect. In another embodiment, the conjugate or a pharmaceutical composition comprising the conjugate requires less frequent administration for routine treatment of a subject, wherein the dose of conjugate or pharmaceutical composition is administered about every four days, about every seven days, about every 10 days, about every 14 days, about every 21 days, or about monthly to the subject, and the conjugate achieves a comparable area under the curve as the corresponding payload(s) not linked to the XTEN and administered to the subject. In yet other embodiments, an accumulatively smaller amount of about 5%, or about 10%, or about 20%, or about 40%, or about 50%, or about 60%, or about 70%, or about 80%, or about 90% less of moles/kg of the conjugate is administered to a subject in comparison to the corresponding amount of the payload(s) not linked to the XTEN under a dose regimen needed to maintain an effective blood concentration, yet the conjugate achieves at least a comparable area under the curve as the corresponding payload(s) not linked to the XTEN. The accumulatively smaller amount is measure for a period of at least about one week, or about 14 days, or about 21 days, or about one month. In some embodiments of the method, the therapeutic effect is a measured parameter, clinical symptom or endpoint known in the art to be associated with the underlying condition of the subject to be treated or prevented.

[0420] In one embodiment, the invention provides a method of treating a cancer cell in vitro, comprising administering to a culture of a cancer cell a composition comprising an effective amount of an XTEN-payload composition, wherein a first payload is a targeting moiety and the second payload is a toxin of Table 21. In another embodiment, the invention provides a method of treating a cancer in a subject, comprising administering to the subject a pharmaceutical composition comprising an effective amount of an XTEN-payload composition wherein a first payload is a targeting moiety and the second payload is a toxin of Table 21. In one embodiment of the method, the pharmaceutical composition comprises the composition having the structure set forth in FIG. 117. In another embodiment of the method, the cancer is selected from the group consisting of non-small cell lung cancer or mesothelioma. platinum-resistant ovarian cancer, endometrial cancer, adenocarcinoma of the lung, and refractory advanced tumors. In another embodiment of the method, the administration results in at least a 10%, or 20%, or 30%, or 40%, or 50%, or 60%, or 70%, or 80%, or 90% greater improvement of at least one, two, or three parameters associated with a cancer compared to an untreated subject wherein the parameters are selected from the group consisting of response rate as defined by the Response Evaluation Criteria in Solid Tumors (RECIST), time-to-progression of the cancer (relapse), discovery of local recurrence, discovery of regional metastasis, discovery of distant metastasis, onset of symptoms, hospitalization, increase in pain medication requirement, requirement of salvage chemotherapy, requirement of salvage surgery, requirement of salvage radiotherapy, time-to-treatment failure, and increased time of survival.

[0421] In another aspect, the invention provides a regimen for treating a subject with a disease, said regimen comprising a composition comprising a conjugate of any of the embodiments described herein. In one embodiment of the regimen, the regimen further comprises the step of determining the amount of pharmaceutical composition comprising the CFXTEN needed to achieve a therapeutic effect in the patient.

[0422] The invention provides conjugates comprising a treatment regimen for a diseased subject comprising administering a pharmaceutical composition comprising a conjugate of any of the embodiments described herein in two or more successive doses administered at an effective amount, wherein the administration results in the improvement of at least one parameter associated with the disease.

### VII). Conjugation Kits

[0423] In another aspect, the invention provides a kit to facilitate the use of the XTEN-crosslinker conjugate compositions. In one embodiment, the kit comprises an XTEN-crosslinker in a formulation, a container and a label on or associated with the container. In the foregoing embodiment, the XTEN-crosslinker can be any one of the embodiments described herein. The container holds the XTEN-crosslinker at a defined concentration in a buffer suitable for use in a conjugation reaction to link to a payload.

### VIII). Pharmaceutical Kits

[0424] In another aspect, the invention provides a kit to facilitate the use of the conjugate compositions. The kit comprises a pharmaceutical composition provided herein, a container and a label or package insert on or associated with the container. Suitable containers include, for example, bottles, vials, syringes, etc., formed from a variety of materials such as glass or plastic. The container holds a pharmaceutical composition as a formulation that is effective for treating a subject and may have a sterile access port (for example the container may be an intravenous solution bag or a vial having a stopper pierceable by a hypodermic injection needle). The package insert can list the approved indications for the drug, instructions for the reconstitution and/or administration of the drug for the use for the approved indication, appropriate dosage and safety information, and information identifying the lot and expiration of the drug. In another embodiment of the foregoing, the kit can comprise a second container that can carry a suitable diluent for the pharmaceutical composition, the use of which will provide the user with the appropriate concentration to be delivered to the subject. In another embodiment, the kit comprises, in at least a first container: a first container: an amount of a conjugate composition drug sufficient to administer in treatment of a subject with a disease; an amount of a pharmaceutically acceptable carrier, a second container that can carry a suitable diluent for the subject composition, which will provide the user with the appropriate concentration of the pharmaceutical composition to be delivered to the subject; together with a label identifying the drug and storage and handling conditions, and/or a sheet of the approved indications for the drug and instructions for the reconstitution and/or administration of the drug for the use for the treatment of a approved indication, appropriate dosage and safety information, and information identifying the lot and expiration of the drug.

### IX). The Nucleic Acids Sequences of the Invention

[0425] The present invention provides isolated polynucleic acids encoding the polypeptide components of the conjugates and sequences complementary to polynucleic acid molecules encoding the polypeptide components of the conjugates. In some embodiments, the invention provides polynucleic acids encoding the XTEN of any of the conjugate embodiments described herein, or the complement of the polynucleic acid. In one embodiment, the polynucleic acids encodes an XTEN selected from the group consisting of the XTEN set forth in Tables 2 and 3, or the complement of the polynucleic acid.

[0426] In other embodiments, the invention provides polynucleic acids encoding the XTEN linked to cleavage sequences, affinity tags and helper sequences protein of any of the embodiments described herein, or the complement of the polynucleic acids. In one embodiment, the polynucleic acids encodes a protein payload selected from the group consisting of the protein payloads set forth in Tables 7, 18, 19, and 21, or the complement of the polynucleic acid.

[0427] In one embodiment, the invention encompasses methods to produce polynucleic acids encoding the XTEN and the XTEN linked to cleavage sequences, affinity tags and helper sequences protein embodiments, or sequences complementary to the polynucleic acids, including homologous variants thereof. In general, and as illustrated in FIGS. 38 and 39, the methods of producing a polynucleotide sequence coding for an XTEN and expressing the resulting gene product include assembling nucleotides encoding the XTEN, ligating the components in frame, incorporating the encoding gene into an expression vector appropriate for a host cell, transforming the appropriate host cell with the expression vector, and culturing the host cell under conditions causing or permitting the XTEN to be expressed in the transformed host cell, thereby producing the XTEN polypeptide, which is recovered by methods described herein or by standard protein purification methods known in the art. Standard recombinant techniques in molecular biology are used to make the polynucleotides and expression vectors of the present invention.

[0428] In accordance with the invention, nucleic acid sequences that encode XTEN or XTEN linked to cleavage sequences, affinity tags and helper sequences protein (or its complement) are used to generate recombinant DNA molecules that direct the expression in appropriate host cells. Several cloning strategies are suitable for performing the present invention, many of which are used to generate a construct that comprises a gene coding for an XTEN or a payload composition of the present invention, or its complement. In one embodiment, the cloning strategy is used to create a gene that encodes an XTEN that comprises nucleotides encoding the XTEN that is used to transform a host cell for expression of the XTEN composition. In the foregoing embodiments hereinabove described in this paragraph, the genes can further comprise nucleotides encoding cleavage sequences, affinity tags, and helper sequences. In another embodiment, the cloning strategy is used to create a gene that encodes a protein payload that comprises nucleotides encoding the payload that is used to transform a host cell for expression of the payload composition.

[0429] In designing a desired XTEN sequences, it was discovered that the non-repetitive nature of the XTEN of the inventive compositions is achieved despite use of a “building block” molecular approach in the creation of the XTEN-encoding sequences. This was achieved by the use of a library of polynucleotides encoding peptide sequence motifs, described above, that are then ligated and/or multimerized to create the genes encoding the XTEN sequences (see FIGS. 38 and 39 and Examples). Thus, while the XTEN(s) of the expressed polypeptide may consist of multiple units of as few as four different sequence motifs, because the motifs themselves consist of non-repetitive amino acid sequences, the overall XTEN sequence is rendered non-repetitive. Accordingly, in one embodiment, the XTEN-encoding polynucleotides comprise multiple polynucleotides that encode non-repetitive sequences, or motifs, operably linked in frame and in which the resulting expressed XTEN amino acid sequences are non-repetitive.

[0430] In one approach, a construct is first prepared containing the DNA sequence corresponding to XTEN. Exemplary methods for the preparation of such constructs are described in the Examples. The construct is then used to create an expression vector suitable for transforming a host cell, such as a prokaryotic host cell (e.g., E. coli) for the expression and recovery of the XTEN. Exemplary methods for the creation of expression vectors, the transformation of host cells and the expression and recovery of XTEN are described in the Examples.

[0431] The gene encoding for the XTEN can be made in one or more steps, either fully synthetically or by synthesis combined with enzymatic processes, such as restriction enzyme-mediated cloning, PCR and overlap extension, including methods more fully described in the Examples. The methods disclosed herein can be used, for example, to ligate short sequences of polynucleotides encoding XTEN into longer XTEN genes of a desired length and sequence. In one embodiment, the method ligates two, three, four or more codon-optimized oligonucleotides encoding XTEN motif or segment sequences of about 9 to 14 amino acids, or about 12 to 20 amino acids, or about 18 to 36 amino acids, or about 48 to about 144 amino acids, or about 144 to about 288 or longer, or any combination of the foregoing ranges of motif or segment lengths. Alternatively, the disclosed method is used to multimerize XTEN-encoding sequences into longer sequences of a desired length; e.g., a gene encoding 36 amino acids of XTEN can be dimerized into a gene encoding 72 amino acids, then 144, then 288, etc. Even with multimerization, XTEN polypeptides can be constructed such that the XTEN-encoding gene has low or virtually no repetitiveness through design of the codons selected for the motifs of the shortest unit being used, which can reduce recombination and increase stability of the encoding gene in the transformed host. Genes encoding XTEN with non-repetitive sequences are assembled from oligonucleotides using standard techniques of gene synthesis. The gene design can be performed using algorithms that optimize codon usage and amino acid composition. In one method of the invention, a library of relatively short XTEN-encoding polynucleotide constructs is created and then assembled, as described above. The resulting genes are then assembled with genes encoding payload peptide or polypeptide, and the resulting genes used to transform a host cell and produce and recover the XTEN-payload for evaluation of its properties, as described herein.

[0432] The resulting polynucleotides encoding the XTEN and the peptide sequences to which it is linked can then be individually cloned into an expression vector. The nucleic acid sequence is inserted into the vector by a variety of procedures. In general, DNA is inserted into an appropriate restriction endonuclease site(s) using techniques known in the art. Vector components generally include, but are not limited to, one or more of a signal sequence, an origin of replication, one or more marker genes, an enhancer element, a promoter, and a transcription termination sequence. Construction of suitable vectors containing one or more of these components employs standard ligation techniques which are known to the skilled artisan. Such techniques are well known in the art and well described in the scientific and patent literature. Various vectors are publicly available. The vector may, for example, be in the form of a plasmid, cosmid, viral particle, or phage that may conveniently be subjected to recombinant DNA procedures, and the choice of vector will often depend on the host cell into which it is to be introduced. Thus, the vector may be an autonomously replicating vector, i.e., a vector, which exists as an extrachromosomal entity, the replication of which is independent of chromosomal replication, e.g., a plasmid. Alternatively, the vector may be one which, when introduced into a host cell, is integrated into the host cell genome and replicated together with the chromosome(s) into which it has been integrated. Representative plasmids are illustrated in FIG. 17, with encoding regions for different configurations of FVIII and XTEN components portrayed.

[0433] The invention provides for the use of plasmid expression vectors containing replication and control sequences that are compatible with and recognized by the host cell, and are operably linked to the gene encoding the polypeptide for controlled expression of the polypeptide. The vector ordinarily carries a replication site, as well as sequences that encode proteins that are capable of providing phenotypic selection in transformed cells. Such vector sequences are well known for a variety of bacteria, yeast, and viruses. Useful expression vectors that can be used include, for example, segments of chromosomal, non-chromosomal and synthetic DNA sequences. “Expression vector” refers to a DNA construct containing a DNA sequence that is operably linked to a suitable control sequence capable of effecting the expression of the DNA encoding the polypeptide in a suitable host. The requirements are that the vectors are replicable and viable in the host cell of choice. Low- or high-copy number vectors may be used as desired.

[0434] Suitable vectors include, but are not limited to, derivatives of SV40 and pcDNA and known bacterial plasmids such as col E I, pCRI, pBR322, pMal-C2, pET, pGEX as described by Smith, et al., Gene 57:31-40 (1988), pMB9 and derivatives thereof, plasmids such as RP4, phage DNAs such as the numerous derivatives of phage I such as NM98 9, as well as other phage DNA such as M13 and filamentous single stranded phage DNA; yeast plasmids such as the 2 micron plasmid or derivatives of the 2 m plasmid, as well as centomeric and integrative yeast shuttle vectors; vectors useful in eukaryotic cells such as vectors useful in insect or mammalian cells; vectors derived from combinations of plasmids and phage DNAs, such as plasmids that have been modified to employ phage DNA or the expression control sequences; and the like. Yeast expression systems that can also be used in the present invention include, but are not limited to, the non-fusion pYES2 vector (Invitrogen), the fusion pYESHisA, B, C (Invitrogen), pRS vectors and the like. The control sequences of the vector include a promoter to effect transcription, an optional operator sequence to control such transcription, a sequence encoding suitable mRNA ribosome binding sites, and sequences that control termination of transcription and translation. The promoter may be any DNA sequence, which shows transcriptional activity in the host cell of choice and may be derived from genes encoding proteins either homologous or heterologous to the host cell. Promoters suitable for use in expression vectors with prokaryotic hosts include the β-lactamase and lactose promoter systems [Chang et al., Nature, 275:615 (1978); Goeddel et al., Nature, 281:544 (1979)], alkaline phosphatase, a tryptophan (trp) promoter system [Goeddel, Nucleic Acids Res., 8:4057 (1980); EP 36, 776], and hybrid promoters such as the tac promoter [deBoer et al., Proc. Natl. Acad. Sci. USA, 80:21-25 (1983)], all is operably linked to the DNA encoding CFXTEN polypeptides. Promoters for use in bacterial systems can also contain a Shine-Dalgarno (S. D.) sequence, operably linked to the DNA encoding CFXTEN polypeptides.

### EXAMPLES

### Example 1: Construction of XTEN_AD36 Motif Segments

[0435] The following example describes the construction of a collection of codon-optimized genes encoding motif sequences of 36 amino acids. As a first step, a stuffer vector pCW0359 was constructed based on a pET vector and that includes a T7 promoter. pCW0359 encodes a cellulose binding domain (CBD) and a TEV protease recognition site followed by a stuffer sequence that is flanked by BsaI, BbsI, and KpnI sites. The BsaI and BbsI sites were inserted such that they generate compatible overhangs after digestion. The stuffer sequence is followed by a truncated version of the GFP gene and a His tag. The stuffer sequence contains stop codons and thus E. coli cells carrying the stuffer plasmid pCW0359 form non-fluorescent colonies. The stuffer vector pCW0359 was digested with BsaI and KpnI to remove the stuffer segment and the resulting vector fragment was isolated by agarose gel purification. The sequences were designated XTEN_AD36, reflecting the AD family of motifs. Its segments have the amino acid sequence [X]₃ where X is a 12mer peptide with the sequences: GESPGGSSGSES (SEQ ID NO: 26), GSEGSSGPGESS (SEQ ID NO: 27), GSSESGSSEGGP (SEQ ID NO: 28), or GSGGEPSESGSS (SEQ ID NO: 29). The insert was obtained by annealing the following pairs of phosphorylated synthetic oligonucleotide pairs:

AD1for:
(SEQ ID NO: 612)
AGGTGAATCTCCDGGTGGYTCYAGCGGTTCYGARTC
AD1rev:
(SEQ ID NO: 613)
ACCTGAYTCRGAACCGCTRGARCCACCHGGAGATTC
AD2for:
(SEQ ID NO: 614)
AGGTAGCGAAGGTTCTTCYGGTCCDGGYGARTCYTC
AD2rev:
(SEQ ID NO: 615)
ACCTGARGAYTCRCCHGGACCRGAAGAACCTTCGCT
AD3for:
(SEQ ID NO: 616)
AGGTTCYTCYGAAAGCGGTTCTTCYGARGGYGGTCC
AD3rev:
(SEQ ID NO: 617)
ACCTGGACCRCCYTCRGAAGAACCGCTTTCRGARGA
AD4for:
(SEQ ID NO: 618)
AGGTTCYGGTGGYGAACCDTCYGARTCTGGTAGCTC

[0436] We also annealed the phosphorylated oligonucleotide 3KpnIstopperFor: AGGTTCGTCTTCACTCGAGGGTAC (SEQ ID NO: 619) and the non-phosphorylated oligonucleotide pr_3KpnIstopperRev: CCTCGAGTGAAGACGA (SEQ ID NO: 620). The annealed oligonucleotide pairs were ligated, which resulted in a mixture of products with varying length that represents the varying number of 12mer repeats ligated to one BbsI/KpnI segment. The products corresponding to the length of 36 amino acids were isolated from the mixture by preparative agarose gel electrophoresis and ligated into the BsaI/KpnI digested stuffer vector pCW0359. Most of the clones in the resulting library designated LCW0401 showed green fluorescence after induction, which shows that the sequence of XTEN_AD36 had been ligated in frame with the GFP gene and that most sequences of XTEN_AD36 had good expression levels.

[0437] We screened 96 isolates from library LCW0401 for high level of fluorescence by stamping them onto agar plate containing IPTG. The same isolates were evaluated by PCR and 48 isolates were identified that contained segments with 36 amino acids as well as strong fluorescence. These isolates were sequenced and 39 clones were identified that contained correct XTEN_AD36 segments. The file names of the nucleotide and amino acid constructs for these

TABLE 22
DNA and Amino Acid Sequences for 36-mer motifs

| | | SEQ | | SEQ |
|---|---|---|---|---|
| | | ID | | ID |
| File name | Amino acid sequence | NO: | Nucleotide sequence | NO: |
| LCW0401_001_ | GSGGEPSESGSSGESP | 621 | GGTTCTGGTGGCGAACCGTCCGAGTCTGGTA | 659 |
| GFP-N_A01.ab1 | GGSSGSESGESPGGSS | | GCTCAGGTGAATCTCCGGGTGGCTCTAGCGG | |
| | GSES | | TTCCGAGTCAGGTGAATCTCCTGGTGGTTCC | |
| | | | AGCGGTTCCGAGTCA | |
| LCW0401_002_ | GSEGSSGPGESSGESP | 622 | GGTAGCGAAGGTTCTTCTGGTCCTGGCGAGT | 660 |
| GFP-N_B01.ab1 | GGSSGSESGSSESGSS | | CTTCAGGTGAATCTCCTGGTGGTTCCAGCGG | |
| | EGGP | | TTCTGAATCAGGTTCCTCCGAAAGCGGTTCT | |
| | | | TCCGAGGGCGGTCCA | |
| LCW0401_003_ | GSSESGSSEGGPGSSE | 623 | GGTTCCTCTGAAAGCGGTTCTTCCGAAGGTG | 661 |
| GFP-N_C01.ab1 | SGSSEGGPGESPGGSS | | GTCCAGGTTCCTCTGAAAGCGGTTCTTCTGA | |
| | GSES | | GGGTGGTCCAGGTGAATCTCCGGGTGGCTCC | |
| | | | AGCGGTTCCGAGTCA | |
| LCW0401_004_ | GSGGEPSESGSSGSSE | 624 | GGTTCCGGTGGCGAACCGTCTGAATCTGGTA | 662 |
| GFP-N_D01.ab1 | SGSSEGGPGSGGEPSE | | GCTCAGGTTCTTCTGAAAGCGGTTCTTCCGA | |
| | SGSS | | GGGTGGTCCAGGTTCTGGTGGTGAACCTTCC | |
| | | | GAGTCTGGTAGCTCA | |
| LCW0401_007_ | GSSESGSSEGGPGSEG | 625 | GGTTCTTCCGAAAGCGGTTCTTCTGAGGGTG | 663 |
| GFP-N_F01.ab1 | SSGPGESSGSEGSSGP | | GTCCAGGTAGCGAAGGTTCTTCCGGTCCAGG | |
| | GESS | | TGAGTCTTCAGGTAGCGAAGGTTCTTCTGGT | |
| | | | CCTGGTGAATCTTCA | |
| LCW0401_008_ | GSSESGSSEGGPGESP | 626 | GGTTCCTCTGAAAGCGGTTCTTCCGAGGGTG | 664 |
| GFP-N_G01.ab1 | GGSSGSESGSEGSSGP | | GTCCAGGTGAATCTCCAGGTGGTTCCAGCGG | |
| | GESS | | TTCTGAGTCAGGTAGCGAAGGTTCTTCTGGT | |
| | | | CCAGGTGAATCCTCA | |
| LCW0401_012_ | GSGGEPSESGSSGSGG | 627 | GGTTCTGGTGGTGAACCGTCTGAGTCTGGTA | 665 |
| GFP-N_H01.ab1 | EPSESGSSGSEGSSGP | | GCTCAGGTTCCGGTGGCGAACCATCCGAATC | |
| | GESS | | TGGTAGCTCAGGTAGCGAAGGTTCTTCCGGT | |
| | | | CCAGGTGAGTCTTCA | |
| LCW0401_015_ | GSSESGSSEGGPGSEG | 628 | GGTTCTTCCGAAAGCGGTTCTTCCGAAGGCG | 666 |
| GFP-N_A02.ab1 | SSGPGESSGESPGGSS | | GTCCAGGTAGCGAAGGTTCTTCTGGTCCAGG | |
| | GSES | | CGAATCTTCAGGTGAATCTCCTGGTGGCTCC | |
| | | | AGCGGTTCTGAGTCA | |
| LCW0401_016_ | GSSESGSSEGGPGSSE | 629 | GGTTCCTCCGAAAGCGGTTCTTCTGAGGGCG | 667 |
| GFP-N_B02.ab1 | SGSSEGGPGSSESGSS | | GTCCAGGTTCCTCCGAAAGCGGTTCTTCCGA | |
| | EGGP | | GGGCGGTCCAGGTTCTTCTGAAAGCGGTTCT | |
| | | | TCCGAGGGCGGTCCA | |
| LCW0401_020_ | GSGGEPSESGSSGSEG | 630 | GGTTCCGGTGGCGAACCGTCCGAATCTGGTA | 668 |
| GFP-N_E02.ab1 | SSGPGESSGSSESGSS | | GCTCAGGTAGCGAAGGTTCTTCTGGTCCAGG | |
| | EGGP | | CGAATCTTCAGGTTCCTCTGAAAGCGGTTCT | |
| | | | TCTGAGGGCGGTCCA | |
| LCW0401_022_ | GSGGEPSESGSSGSSE | 631 | GGTTCTGGTGGTGAACCGTCCGAATCTGGTA | 669 |
| GFP-N_F02.ab1 | SGSSEGGPGSGGEPSE | | GCTCAGGTTCTTCCGAAAGCGGTTCTTCTGA | |
| | SGSS | | AGGTGGTCCAGGTTCCGGTGGCGAACCTTCT | |
| | | | GAATCTGGTAGCTCA | |
| LCW0401_024_ | GSGGEPSESGSSGSSE | 632 | GGTTCTGGTGGCGAACCGTCCGAATCTGGTA | 670 |
| GFP-N_G02.ab1 | SGSSEGGPGESPGGSS | | GCTCAGGTTCCTCCGAAAGCGGTTCTTCTGA | |
| | GSES | | AGGTGGTCCAGGTGAATCTCCAGGTGGTTCT | |
| | | | AGCGGTTCTGAATCA | |
| LCW0401_026_ | GSGGEPSESGSSGESP | 633 | GGTTCTGGTGGCGAACCGTCTGAGTCTGGTA | 671 |
| GFP-N_H02.ab1 | GGSSGSESGSEGSSGP | | GCTCAGGTGAATCTCCTGGTGGCTCCAGCGG | |
| | GESS | | TTCTGAATCAGGTAGCGAAGGTTCTTCTGGT | |
| | | | CCTGGTGAATCTTCA | |
| LCW0401_027_ | GSGGEPSESGSSGESP | 634 | GGTTCCGGTGGCGAACCTTCCGAATCTGGTA | 672 |
| GFP-N_A03.ab1 | GGSSGSESGSGGEPSE | | GCTCAGGTGAATCTCCGGGTGGTTCTAGCGG | |
| | SGSS | | TTCTGAGTCAGGTTCTGGTGGTGAACCTTCC | |
| | | | GAGTCTGGTAGCTCA | |
| LCW0401_028_ | GSSESGSSEGGPGSSE | 635 | GGTTCCTCTGAAAGCGGTTCTTCTGAGGGCG | 673 |
| GFP-N_B03.ab1 | SGSSEGGPGSSESGSS | | GTCCAGGTTCTTCCGAAAGCGGTTCTTCCGA | |
| | EGGP | | GGGCGGTCCAGGTTCTTCCGAAAGCGGTTCT | |
| | | | TCTGAAGGCGGTCCA | |
| LCW0401_030_ | GESPGGSSGSESGSEG | 636 | GGTGAATCTCCGGGTGGCTCCAGCGGTTCTG | 674 |
| GFP-N_C03.ab1 | SSGPGESSGSEGSSGP | | AGTCAGGTAGCGAAGGTTCTTCCGGTCCGGG | |
| | GESS | | TGAGTCCTCAGGTAGCGAAGGTTCTTCCGGT | |
| | | | CCTGGTGAGTCTTCA | |
| LCW0401_031_ | GSGGEPSESGSSGSGG | 637 | GGTTCTGGTGGCGAACCTTCCGAATCTGGTA | 675 |
| GFP-N_D03.ab1 | EPSESGSSGSSESGSS | | GCTCAGGTTCCGGTGGTGAACCTTCTGAATC | |
| | EGGP | | TGGTAGCTCAGGTTCTTCTGAAAGCGGTTCT | |
| | | | TCCGAGGGCGGTCCA | |
| LCW0401_033_ | GSGGEPSESGSSGSGG | 638 | GGTTCCGGTGGTGAACCTTCTGAATCTGGTA | 676 |
| GFP-N_E03.ab1 | EPSESGSSGSGGEPSE | | GCTCAGGTTCCGGTGGCGAACCATCCGAGTC | |
| | SGSS | | TGGTAGCTCAGGTTCCGGTGGTGAACCATCC | |
| | | | GAGTCTGGTAGCTCA | |
| LCW0401_037_ | GSGGEPSESGSSGSSE | 639 | GGTTCCGGTGGCGAACCTTCTGAATCTGGTA | 677 |
| GFP-N_F03.ab1 | SGSSEGGPGSEGSSGP | | GCTCAGGTTCCTCCGAAAGCGGTTCTTCTGA | |
| | GESS | | GGGCGGTCCAGGTAGCGAAGGTTCTTCTGGT | |
| | | | CCGGGCGAGTCTTCA | |
| LCW0401_038_ | GSGGEPSESGSSGSEG | 640 | GGTTCCGGTGGTGAACCGTCCGAGTCTGGTA | 678 |
| GFP-N_G03.ab1 | SSGPGESSGSGGEPSE | | GCTCAGGTAGCGAAGGTTCTTCTGGTCCGGG | |
| | SGSS | | TGAGTCTTCAGGTTCTGGTGGCGAACCGTCC | |
| | | | GAATCTGGTAGCTCA | |
| LCW0401_039_ | GSGGEPSESGSSGESP | 641 | GGTTCTGGTGGCGAACCGTCCGAATCTGGTA | 679 |
| GFP-N_H03.ab1 | GGSSGSESGSGGEPSE | | GCTCAGGTGAATCTCCTGGTGGTTCCAGCGG | |
| | SGSS | | TTCCGAGTCAGGTTCTGGTGGCGAACCTTCC | |
| | | | GAATCTGGTAGCTCA | |
| LCW0401_040_ | GSSESGSSEGGPGSGG | 642 | GGTTCTTCCGAAAGCGGTTCTTCCGAGGGCG | 680 |
| GFP-N_A04.ab1 | EPSESGSSGSSESGSS | | GTCCAGGTTCCGGTGGTGAACCATCTGAATC | |
| | EGGP | | TGGTAGCTCAGGTTCTTCTGAAAGCGGTTCT | |
| | | | TCTGAAGGTGGTCCA | |
| LCW0401_042_ | GSEGSSGPGESSGESP | 643 | GGTAGCGAAGGTTCTTCCGGTCCTGGTGAGT | 681 |
| GFP-N_C04.ab1 | GGSSGSESGSEGSSGP | | CTTCAGGTGAATCTCCAGGTGGCTCTAGCGG | |
| | GESS | | TTCCGAGTCAGGTAGCGAAGGTTCTTCTGGT | |
| | | | CCTGGCGAGTCCTCA | |
| LCW0401_046_ | GSSESGSSEGGPGSSE | 644 | GGTTCCTCTGAAAGCGGTTCTTCCGAAGGCG | 682 |
| GFP-N_D04.ab1 | SGSSEGGPGSSESGSS | | GTCCAGGTTCTTCCGAAAGCGGTTCTTCTGA | |
| | EGGP | | GGGCGGTCCAGGTTCCTCCGAAAGCGGTTCT | |
| | | | TCTGAGGGTGGTCCA | |
| LCW0401_047_ | GSGGEPSESGSSGESP | 645 | GGTTCTGGTGGCGAACCTTCCGAGTCTGGTA | 683 |
| GFP-N_E04.ab1 | GGSSGSESGESPGGSS | | GCTCAGGTGAATCTCCGGGTGGTTCTAGCGG | |
| | GSES | | TTCCGAGTCAGGTGAATCTCCGGGTGGTTCC | |
| | | | AGCGGTTCTGAGTCA | |
| LCW0401_051_ | GSGGEPSESGSSGSEG | 646 | GGTTCTGGTGGCGAACCATCTGAGTCTGGTA | 684 |
| GFP-N_F04.ab1 | SSGPGESSGESPGGSS | | GCTCAGGTAGCGAAGGTTCTTCCGGTCCAGG | |
| | GSES | | CGAGTCTTCAGGTGAATCTCCTGGTGGCTCC | |
| | | | AGCGGTTCTGAGTCA | |
| LCW0401_053_ | GESPGGSSGSESGESP | 647 | GGTGAATCTCCTGGTGGTTCCAGCGGTTCCG | 685 |
| GFP-N_H04.ab1 | GGSSGSESGESPGGSS | | AGTCAGGTGAATCTCCAGGTGGCTCTAGCGG | |
| | GSES | | TTCCGAGTCAGGTGAATCTCCTGGTGGTTCT | |
| | | | AGCGGTTCTGAATCA | |
| LCW0401_054_ | GSEGSSGPGESSGSEG | 648 | GGTAGCGAAGGTTCTTCCGGTCCAGGTGAAT | 686 |
| GFP-N_A05.ab1 | SSGPGESSGSGGEPSE | | CTTCAGGTAGCGAAGGTTCTTCTGGTCCTGG | |
| | SGSS | | TGAATCCTCAGGTTCCGGTGGCGAACCATCT | |
| | | | GAATCTGGTAGCTCA | |
| LCW0401_059_ | GSGGEPSESGSSGSEG | 649 | GGTTCTGGTGGCGAACCATCCGAATCTGGTA | 687 |
| GFP-N_D05.ab1 | SSGPGESSGESPGGSS | | GCTCAGGTAGCGAAGGTTCTTCTGGTCCTGG | |
| | GSES | | CGAATCTTCAGGTGAATCTCCAGGTGGCTCT | |
| | | | AGCGGTTCCGAATCA | |
| LCW0401_060_ | GSGGEPSESGSSGSSE | 650 | GGTTCCGGTGGTGAACCGTCCGAATCTGGTA | 688 |
| GFP-N_E05.ab1 | SGSSEGGPGSGGEPSE | | GCTCAGGTTCCTCTGAAAGCGGTTCTTCCGA | |
| | SGSS | | GGGTGGTCCAGGTTCCGGTGGTGAACCTTCT | |
| | | | GAGTCTGGTAGCTCA | |
| LCW0401_061_ | GSSESGSSEGGPGSGG | 651 | GGTTCCTCTGAAAGCGGTTCTTCTGAGGGCG | 689 |
| GFP-N_F05.ab1 | EPSESGSSGSEGSSGP | | GTCCAGGTTCTGGTGGCGAACCATCTGAATC | |
| | GESS | | TGGTAGCTCAGGTAGCGAAGGTTCTTCCGGT | |
| | | | CCGGGTGAATCTTCA | |
| LCW0401_063_ | GSGGEPSESGSSGSEG | 652 | GGTTCTGGTGGTGAACCGTCCGAATCTGGTA | 690 |
| GFP-N_H05.ab1 | SSGPGESSGSEGSSGP | | GCTCAGGTAGCGAAGGTTCTTCTGGTCCTGG | |
| | GESS | | CGAGTCTTCAGGTAGCGAAGGTTCTTCTGGT | |
| | | | CCTGGTGAATCTTCA | |
| LCW0401_066_ | GSGGEPSESGSSGSSE | 653 | GGTTCTGGTGGCGAACCATCCGAGTCTGGTA | 691 |
| GFP-N_B06.ab1 | SGSSEGGPGSGGEPSE | | GCTCAGGTTCTTCCGAAAGCGGTTCTTCCGA | |
| | SGSS | | AGGCGGTCCAGGTTCTGGTGGTGAACCGTCC | |
| | | | GAATCTGGTAGCTCA | |
| LCW0401_067_ | GSGGEPSESGSSGESP | 654 | GGTTCCGGTGGCGAACCTTCCGAATCTGGTA | 692 |
| GFP-N_C06.ab1 | GGSSGSESGESPGGSS | | GCTCAGGTGAATCTCCGGGTGGTTCTAGCGG | |
| | GSES | | TTCCGAATCAGGTGAATCTCCAGGTGGTTCT | |
| | | | AGCGGTTCCGAATCA | |
| LCW0401_069_ | GSGGEPSESGSSGSGG | 655 | GGTTCCGGTGGTGAACCATCTGAGTCTGGTA | 693 |
| GFP-N_D06.ab1 | EPSESGSSGESPGGSS | | GCTCAGGTTCCGGTGGCGAACCGTCCGAGTC | |
| | GSES | | TGGTAGCTCAGGTGAATCTCCGGGTGGTTCC | |
| | | | AGCGGTTCCGAATCA | |
| LCW0401_070_ | GSEGSSGPGESSGSSE | 656 | GGTAGCGAAGGTTCTTCTGGTCCGGGCGAAT | 694 |
| GFP-N_E06.ab1 | SGSSEGGPGSEGSSGP | | CCTCAGGTTCCTCCGAAAGCGGTTCTTCCGA | |
| | GESS | | AGGTGGTCCAGGTAGCGAAGGTTCTTCCGGT | |
| | | | CCTGGTGAATCTTCA | |
| LCW0401_078_ | GSSESGSSEGGPGESP | 657 | GGTTCCTCTGAAAGCGGTTCTTCTGAAGGCG | 695 |
| GFP-N_F06.ab1 | GGSSGSESGESPGGSS | | GTCCAGGTGAATCTCCGGGTGGCTCCAGCGG | |
| | GSES | | TTCTGAATCAGGTGAATCTCCTGGTGGCTCC | |
| | | | AGCGGTTCCGAGTCA | |
| LCW0401_079_ | GSEGSSGPGESSGSEG | 658 | GGTAGCGAAGGTTCTTCTGGTCCAGGCGAGT | 696 |
| GFP-N_G06.ab1 | SSGPGESSGSGGEPSE | | CTTCAGGTAGCGAAGGTTCTTCCGGTCCTGG | |
| | SGSS | | CGAGTCTTCAGGTTCCGGTGGCGAACCGTCC | |
| | | | GAATCTGGTAGCTCA | |

### Example 2: Construction of XTEN_AE36 Segments

[0438] A codon library encoding XTEN sequences of 36 amino acid length was constructed. The XTEN sequence was designated XTEN_AE36. Its segments have the amino acid sequence [X]₃ where X is a 12mer peptide with the sequence: GSPAGSPTSTEE (SEQ ID NO: 30), GSEPATSGSE TP (SEQ ID NO: 31), GTSESA TPESGP (SEQ ID NO: 32), or GTSTEPSEGSAP (SEQ ID NO: 33). The insert was obtained by annealing the following pairs of phosphorylated synthetic oligonucleotide pairs:

AE1for:
(SEQ ID NO: 697)
AGGTAGCCCDGCWGGYTCTCCDACYTCYACYGARGA
AE1rev:
(SEQ ID NO: 698)
ACCTTCYTCRGTRGARGTHGGAGARCCWGCHGGGCT
AE2for:
(SEQ ID NO: 699)
AGGTAGCGAACCKGCWACYTCYGGYTCTGARACYCC
AE2rev:
(SEQ ID NO: 700)
ACCTGGRGTYTCAGARCCRGARGTWGCMGGTTCGCT
AE3for:
(SEQ ID NO: 701)
AGGTACYTCTGAAAGCGCWACYCCKGARTCYGGYCC
AE3rev:
(SEQ ID NO: 702)
ACCTGGRCCRGAYTCMGGRGTWGCGCTTTCAGARGT
AE4for:
(SEQ ID NO: 703)
AGGTACYTCTACYGAACCKTCYGARGGYAGCGCWCC
AE4rev:
(SEQ ID NO: 704)
ACCTGGWGCGCTRCCYTCRGAMGGTTCRGTAGARGT

[0439] We also annealed the phosphorylated oligonucleotide 3KpnIstopperFor: AGGTSCGTCTTCACTCGAGGGTAC (SEQ ID NO: 619) and the non-phosphorylated oligonucleotide pr_3KpnIstopperRev: CCTCGAGTGAAGACGA (SEQ ID NO: 620). The annealed oligonucleotide pairs were ligated, which resulted in a mixture of products with varying length that represents the varying number of 12mer repeats ligated to one BbsI/KpnI segment. The products corresponding to the length of 36 amino acids were isolated from the mixture by preparative agarose gel electrophoresis and ligated into the BsaI/KpnI digested stuffier vector pCW0359. Most of the clones in the resulting library designated LCW0402 showed green fluorescence after induction which shows that the sequence of XTEN_AE36 had been ligated in frame with the GFP gene and most sequences of XTEN_AE36 show good expression.

[0440] We screened isolates from library LCW0402 for high level of fluorescence by stamping them onto agar plate containing IPTG. The same isolates were evaluated by PCR and 48 isolates were identified that contained segments with 36 amino acids as well as strong fluorescence. These isolates were sequenced and 37 clones were identified that contained correct XTEN_AE36 segments. The file names of the nucleotide and amino acid constructs for these segments are listed in Table 23.

TABLE 23
DNA and Amino Acid Sequences for 36-mer motifs

| | | SEQ | | SEQ |
|---|---|---|---|---|
| | Amino acid | ID | | ID |
| File name | sequence | NO: | Nucleotide sequence | NO: |
| LCW0402_002_ | GSPAGSPTSTEEG | 705 | GGTAGCCCGGCAGGCTCTCCGACCTCTA | 742 |
| GFP-N_A07.ab1 | TSESATPESGPGT | | CTGAGGAAGGTACTTCTGAAAGCGCAAC | |
| | STEPSEGSAP | | CCCGGAGTCCGGCCCAGGTACCTCTACC | |
| | | | GAACCGTCTGAGGGCAGCGCACCA | |
| LCW0402_003_ | GTSTEPSEGSAPG | 706 | GGTACTTCTACCGAACCGTCCGAAGGCA | 743 |
| GFP-N_B07.ab1 | TSTEPSEGSAPGT | | GCGCTCCAGGTACCTCTACTGAACCTTCC | |
| | STEPSEGSAP | | GAGGGCAGCGCTCCAGGTACCTCTACCG | |
| | | | AACCTTCTGAAGGTAGCGCACCA | |
| LCW0402_004_ | GTSTEPSEGSAPG | 707 | GGTACCTCTACCGAACCGTCTGAAGGTA | 744 |
| GFP-N_C07.ab1 | TSESATPESGPGT | | GCGCACCAGGTACCTCTGAAAGCGCAAC | |
| | SESATPESGP | | TCCTGAGTCCGGTCCAGGTACTTCTGAAA | |
| | | | GCGCAACCCCGGAGTCTGGCCCA | |
| LCW0402_005_ | GTSTEPSEGSAPG | 708 | GGTACTTCTACTGAACCGTCTGAAGGTA | 745 |
| GFP-N_D07.ab1 | TSESATPESGPGT | | GCGCACCAGGTACTTCTGAAAGCGCAAC | |
| | SESATPESGP | | CCCGGAATCCGGCCCAGGTACCTCTGAA | |
| | | | AGCGCAACCCCGGAGTCCGGCCCA | |
| LCW0402_006_ | GSEPATSGSETPG | 709 | GGTAGCGAACCGGCAACCTCCGGCTCTG | 746 |
| GFP-N_E07.ab1 | TSESATPESGPGS | | AAACCCCAGGTACCTCTGAAAGCGCTAC | |
| | PAGSPTSTEE | | TCCTGAATCCGGCCCAGGTAGCCCGGCA | |
| | | | GGTTCTCCGACTTCCACTGAGGAA | |
| LCW0402_008_ | GTSESATPESGPG | 710 | GGTACTTCTGAAAGCGCAACCCCTGAAT | 747 |
| GFP-N_F07.ab1 | SEPATSGSETPGT | | CCGGTCCAGGTAGCGAACCGGCTACTTC | |
| | STEPSEGSAP | | TGGCTCTGAGACTCCAGGTACTTCTACCG | |
| | | | AACCGTCCGAAGGTAGCGCACCA | |
| LCW0402_009_ | GSPAGSPTSTEEG | 711 | GGTAGCCCGGCTGGCTCTCCAACCTCCA | 748 |
| GFP-N_G07.ab1 | SPAGSPTSTEEGS | | CTGAGGAAGGTAGCCCGGCTGGCTCTCC | |
| | EPATSGSETP | | AACCTCCACTGAAGAAGGTAGCGAACCG | |
| | | | GCTACCTCCGGCTCTGAAACTCCA | |
| LCW0402_011_ | GSPAGSPTSTEEG | 712 | GGTAGCCCGGCTGGCTCTCCTACCTCTAC | 749 |
| GFP-N_A08.ab1 | TSESATPESGPGT | | TGAGGAAGGTACTTCTGAAAGCGCTACT | |
| | STEPSEGSAP | | CCTGAGTCTGGTCCAGGTACCTCTACTGA | |
| | | | ACCGTCCGAAGGTAGCGCTCCA | |
| LCW0402_012_ | GSPAGSPTSTEEG | 713 | GGTAGCCCTGCTGGCTCTCCGACTTCTAC | 750 |
| GFP-N_B08.ab1 | SPAGSPTSTEEGT | | TGAGGAAGGTAGCCCGGCTGGTTCTCCG | |
| | STEPSEGSAP | | ACTTCTACTGAGGAAGGTACTTCTACCG | |
| | | | AACCTTCCGAAGGTAGCGCTCCA | |
| LCW0402_013_ | GTSESATPESGPG | 714 | GGTACTTCTGAAAGCGCTACTCCGGAGT | 751 |
| GFP-N_C08.ab1 | TSTEPSEGSAPGT | | CCGGTCCAGGTACCTCTACCGAACCGTC | |
| | STEPSEGSAP | | CGAAGGCAGCGCTCCAGGTACTTCTACT | |
| | | | GAACCTTCTGAGGGTAGCGCTCCA | |
| LCW0402_014_ | GTSTEPSEGSAPG | 715 | GGTACCTCTACCGAACCTTCCGAAGGTA | 752 |
| GFP-N_D08.ab1 | SPAGSPTSTEEGT | | GCGCTCCAGGTAGCCCGGCAGGTTCTCC | |
| | STEPSEGSAP | | TACTTCCACTGAGGAAGGTACTTCTACCG | |
| | | | AACCTTCTGAGGGTAGCGCACCA | |
| LCW0402_015_ | GSEPATSGSETPG | 716 | GGTAGCGAACCGGCTACTTCCGGCTCTG | 753 |
| GFP-N_E08.ab1 | SPAGSPTSTEEGT | | AGACTCCAGGTAGCCCTGCTGGCTCTCC | |
| | SESATPESGP | | GACCTCTACCGAAGAAGGTACCTCTGAA | |
| | | | AGCGCTACCCCTGAGTCTGGCCCA | |
| LCW0402_016_ | GTSTEPSEGSAPG | 717 | GGTACTTCTACCGAACCTTCCGAGGGCA | 754 |
| GFP-N_F08.ab1 | TSESATPESGPGT | | GCGCACCAGGTACTTCTGAAAGCGCTAC | |
| | SESATPESGP | | CCCTGAGTCCGGCCCAGGTACTTCTGAA | |
| | | | AGCGCTACTCCTGAATCCGGTCCA | |
| LCW0402_020_ | GTSTEPSEGSAPG | 718 | GGTACTTCTACTGAACCGTCTGAAGGCA | 755 |
| GFP-N_G08.ab1 | SEPATSGSETPGS | | GCGCACCAGGTAGCGAACCGGCTACTTC | |
| | PAGSPTSTEE | | CGGTTCTGAAACCCCAGGTAGCCCAGCA | |
| | | | GGTTCTCCAACTTCTACTGAAGAA | |
| LCW0402_023_ | GSPAGSPTSTEEG | 719 | GGTAGCCCTGCTGGCTCTCCAACCTCCAC | 756 |
| GFP-N_A09.ab1 | TSESATPESGPGS | | CGAAGAAGGTACCTCTGAAAGCGCAACC | |
| | EPATSGSETP | | CCTGAATCCGGCCCAGGTAGCGAACCGG | |
| | | | CAACCTCCGGTTCTGAAACCCCA | |
| LCW0402_024_ | GTSESATPESGPG | 720 | GGTACTTCTGAAAGCGCTACTCCTGAGTC | 757 |
| GFP-N_B09.ab1 | SPAGSPTSTEEGS | | CGGCCCAGGTAGCCCGGCTGGCTCTCCG | |
| | PAGSPTSTEE | | ACTTCCACCGAGGAAGGTAGCCCGGCTG | |
| | | | GCTCTCCAACTTCTACTGAAGAA | |
| LCW0402_025_ | GTSTEPSEGSAPG | 721 | GGTACCTCTACTGAACCTTCTGAGGGCA | 758 |
| GFP-N_C09.ab1 | TSESATPESGPGT | | GCGCTCCAGGTACTTCTGAAAGCGCTAC | |
| | STEPSEGSAP | | CCCGGAGTCCGGTCCAGGTACTTCTACTG | |
| | | | AACCGTCCGAAGGTAGCGCACCA | |
| LCW0402_026_ | GSPAGSPTSTEEG | 722 | GGTAGCCCGGCAGGCTCTCCGACTTCCA | 759 |
| GFP-N_D09.ab1 | TSTEPSEGSAPGS | | CCGAGGAAGGTACCTCTACTGAACCTTC | |
| | EPATSGSETP | | TGAGGGTAGCGCTCCAGGTAGCGAACCG | |
| | | | GCAACCTCTGGCTCTGAAACCCCA | |
| LCW0402_027_ | GSPAGSPTSTEEG | 723 | GGTAGCCCAGCAGGCTCTCCGACTTCCA | 760 |
| GFP-N_E09.ab1 | TSTEPSEGSAPGT | | CTGAGGAAGGTACTTCTACTGAACCTTCC | |
| | STEPSEGSAP | | GAAGGCAGCGCACCAGGTACCTCTACTG | |
| | | | AACCTTCTGAGGGCAGCGCTCCA | |
| LCW0402_032_ | GSEPATSGSETPG | 724 | GGTAGCGAACCTGCTACCTCCGGTTCTG | 761 |
| GFP-N_H09.ab1 | TSESATPESGPGS | | AAACCCCAGGTACCTCTGAAAGCGCAAC | |
| | PAGSPTSTEE | | TCCGGAGTCTGGTCCAGGTAGCCCTGCA | |
| | | | GGTTCTCCTACCTCCACTGAGGAA | |
| LCW0402_034_ | GTSESATPESGPG | 725 | GGTACCTCTGAAAGCGCTACTCCGGAGT | 762 |
| GFP-N_A10.ab1 | TSTEPSEGSAPGT | | CTGGCCCAGGTACCTCTACTGAACCGTCT | |
| | STEPSEGSAP | | GAGGGTAGCGCTCCAGGTACTTCTACTG | |
| | | | AACCGTCCGAAGGTAGCGCACCA | |
| LCW0402_036_ | GSPAGSPTSTEEG | 726 | GGTAGCCCGGCTGGTTCTCCGACTTCCAC | 763 |
| GFP-N_C10.ab1 | TSTEPSEGSAPGT | | CGAGGAAGGTACCTCTACTGAACCTTCT | |
| | STEPSEGSAP | | GAGGGTAGCGCTCCAGGTACCTCTACTG | |
| | | | AACCTTCCGAAGGCAGCGCTCCA | |
| LCW0402_039_ | GTSTEPSEGSAPG | 727 | GGTACTTCTACCGAACCGTCCGAGGGCA | 764 |
| GFP-N_E10.ab1 | TSTEPSEGSAPGT | | GCGCTCCAGGTACTTCTACTGAACCTTCT | |
| | STEPSEGSAP | | GAAGGCAGCGCTCCAGGTACTTCTACTG | |
| | | | AACCTTCCGAAGGTAGCGCACCA | |
| LCW0402_040_ | GSEPATSGSETPG | 728 | GGTAGCGAACCTGCAACCTCTGGCTCTG | 765 |
| GFP-N_F10.ab1 | TSESATPESGPGT | | AAACCCCAGGTACCTCTGAAAGCGCTAC | |
| | STEPSEGSAP | | TCCTGAATCTGGCCCAGGTACTTCTACTG | |
| | | | AACCGTCCGAGGGCAGCGCACCA | |
| LCW0402_041_ | GTSTEPSEGSAPG | 729 | GGTACTTCTACCGAACCGTCCGAGGGTA | 766 |
| GFP-N_G10.ab1 | SPAGSPTSTEEGT | | GCGCACCAGGTAGCCCAGCAGGTTCTCC | |
| | STEPSEGSAP | | TACCTCCACCGAGGAAGGTACTTCTACC | |
| | | | GAACCGTCCGAGGGTAGCGCACCA | |
| LCW0402_050_ | GSEPATSGSETPG | 730 | GGTAGCGAACCGGCAACCTCCGGCTCTG | 767 |
| GFP-N_A11.ab1 | TSESATPESGPGS | | AAACTCCAGGTACTTCTGAAAGCGCTAC | |
| | EPATSGSETP | | TCCGGAATCCGGCCCAGGTAGCGAACCG | |
| | | | GCTACTTCCGGCTCTGAAACCCCA | |
| LCW0402_051_ | GSEPATSGSETPG | 731 | GGTAGCGAACCGGCAACTTCCGGCTCTG | 768 |
| GFP-N_B11.ab1 | TSESATPESGPGS | | AAACCCCAGGTACTTCTGAAAGCGCTAC | |
| | EPATSGSETP | | TCCTGAGTCTGGCCCAGGTAGCGAACCT | |
| | | | GCTACCTCTGGCTCTGAAACCCCA | |
| LCW0402_059_ | GSEPATSGSETPG | 732 | GGTAGCGAACCGGCAACCTCTGGCTCTG | 769 |
| GFP-N_E11.ab1 | SEPATSGSETPGT | | AAACTCCAGGTAGCGAACCTGCAACCTC | |
| | STEPSEGSAP | | CGGCTCTGAAACCCCAGGTACTTCTACTG | |
| | | | AACCTTCTGAGGGCAGCGCACCA | |
| LCW0402_060_ | GTSESATPESGPG | 733 | GGTACTTCTGAAAGCGCTACCCCGGAAT | 770 |
| GFP-N_F11.ab1 | SEPATSGSETPGS | | CTGGCCCAGGTAGCGAACCGGCTACTTC | |
| | EPATSGSETP | | TGGTTCTGAAACCCCAGGTAGCGAACCG | |
| | | | GCTACCTCCGGTTCTGAAACTCCA | |
| LCW0402_061_ | GTSTEPSEGSAPG | 734 | GGTACCTCTACTGAACCTTCCGAAGGCA | 771 |
| GFP-N_G11.ab1 | TSTEPSEGSAPGT | | GCGCTCCAGGTACCTCTACCGAACCGTC | |
| | SESATPESGP | | CGAGGGCAGCGCACCAGGTACTTCTGAA | |
| | | | AGCGCAACCCCTGAATCCGGTCCA | |
| LCW0402_065_ | GSEPATSGSETPG | 735 | GGTAGCGAACCGGCAACCTCTGGCTCTG | 772 |
| GFP-N_A12.ab1 | TSESATPESGPGT | | AAACCCCAGGTACCTCTGAAAGCGCTAC | |
| | SESATPESGP | | TCCGGAATCTGGTCCAGGTACTTCTGAA | |
| | | | AGCGCTACTCCGGAATCCGGTCCA | |
| LCW0402_066_ | GSEPATSGSETPG | 736 | GGTAGCGAACCTGCTACCTCCGGCTCTG | 773 |
| GFP-N_B12.ab1 | SEPATSGSETPGT | | AAACTCCAGGTAGCGAACCGGCTACTTC | |
| | STEPSEGSAP | | CGGTTCTGAAACTCCAGGTACCTCTACCG | |
| | | | AACCTTCCGAAGGCAGCGCACCA | |
| LCW0402_067_ | GSEPATSGSETPG | 737 | GGTAGCGAACCTGCTACTTCTGGTTCTGA | 774 |
| GFP-N_C12.ab1 | TSTEPSEGSAPGS | | AACTCCAGGTACTTCTACCGAACCGTCC | |
| | EPATSGSETP | | GAGGGTAGCGCTCCAGGTAGCGAACCTG | |
| | | | CTACTTCTGGTTCTGAAACTCCA | |
| LCW0402_069_ | GTSTEPSEGSAPG | 738 | GGTACCTCTACCGAACCGTCCGAGGGTA | 775 |
| GFP-N_D12.ab1 | TSTEPSEGSAPGS | | GCGCACCAGGTACCTCTACTGAACCGTC | |
| | EPATSGSETP | | TGAGGGTAGCGCTCCAGGTAGCGAACCG | |
| | | | GCAACCTCCGGTTCTGAAACTCCA | |
| LCW0402_073_ | GTSTEPSEGSAPG | 739 | GGTACTTCTACTGAACCTTCCGAAGGTA | 776 |
| GFP-N_F12.ab1 | SEPATSGSETPGS | | GCGCTCCAGGTAGCGAACCTGCTACTTCT | |
| | PAGSPTSTEE | | GGTTCTGAAACCCCAGGTAGCCCGGCTG | |
| | | | GCTCTCCGACCTCCACCGAGGAA | |
| LCW0402_074_ | GSEPATSGSETPG | 740 | GGTAGCGAACCGGCTACTTCCGGCTCTG | 777 |
| GFP-N_G12.ab1 | SPAGSPTSTEEGT | | AGACTCCAGGTAGCCCAGCTGGTTCTCC | |
| | SESATPESGP | | AACCTCTACTGAGGAAGGTACTTCTGAA | |
| | | | AGCGCTACCCCTGAATCTGGTCCA | |
| LCW0402_075_ | GTSESATPESGPG | 741 | GGTACCTCTGAAAGCGCAACTCCTGAGT | 778 |
| GFP-N_H12.ab1 | SEPATSGSETPGT | | CTGGCCCAGGTAGCGAACCTGCTACCTC | |
| | SESATPESGP | | CGGCTCTGAGACTCCAGGTACCTCTGAA | |
| | | | AGCGCAACCCCGGAATCTGGTCCA | |

### Example 3: Construction of XTEN_AF36 Segments

[0441] A codon library encoding sequences of 36 amino acid length was constructed. The sequences were designated XTEN_AF36. Its segments have the amino acid sequence [X]3 where X is a 12mer peptide with the sequence: GSTSESPSGTAP (SEQ ID NO: 34), GTSTPESGSASP (SEQ ID NO: 35), GTSPSGESSTAP (SEQ ID NO: 36), or GSTSSTAESPGP (SEQ ID NO: 37). The insert was obtained by annealing the following pairs of phosphorylated synthetic oligonucleotide pairs:

AF1for:
(SEQ ID NO: 779)
AGGTTCTACYAGCGAATCYCCKTCTGGYACYGCWCC
AF1rev:
(SEQ ID NO: 780)
ACCTGGWGCRGTRCCAGAMGGRGATTCGCTRGTAGA
AF2for:
(SEQ ID NO: 781)
AGGTACYTCTACYCCKGAAAGCGGYTCYGCWTCTCC
AF2rev:
(SEQ ID NO: 782)
ACCTGGAGAWGCRGARCCGCTTTCMGGRGTAGARGT
AF3for:
(SEQ ID NO: 783)
AGGTACYTCYCCKAGCGGYGAATCTTCTACYGCWCC
AF3rev:
(SEQ ID NO: 784)
ACCTGGWGCRGTAGAAGATTCRCCGCTMGGRGARGT
AF4for:
(SEQ ID NO: 785)
AGGTTCYACYAGCTCTACYGCWGAATCTCCKGGYCC
AF4rev:
(SEQ ID NO: 786)
ACCTGGRCCMGGAGATTCWGCRGTAGAGCTRGTRGA

[0442] We also annealed the phosphorylated oligonucleotide 3KpnIstopperFor: AGGTTCGTCTTCACTCGAGGGTAC (SEQ ID NO: 619) and the non-phosphorylated oligonucleotide pr_3KpnIstopperRev: CCTCGAGTGAAGACGA (SEQ ID NO: 620). The annealed oligonucleotide pairs were ligated, which resulted in a mixture of products with varying length that represents the varying number of 12mer repeats ligated to one BbsI/KpnI segment The products corresponding to the length of 36 amino acids were isolated from the mixture by preparative agarose gel electrophoresis and ligated into the BsaI/KpnI digested stuffer vector pCW0359. Most of the clones in the resulting library designated LCW0403 showed green fluorescence after induction which shows that the sequence of XTEN_AF36 had been ligated in frame with the GFP gene and most sequences of XTEN_AF36 show good expression.

[0443] We screened isolates from library LCW0403 for high level of fluorescence by stamping them onto agar plate containing IPTG. The same isolates were evaluated by PCR and 48 isolates were identified that contained segments with 36 amino acids as well as strong fluorescence. These isolates were sequenced and 44 clones were identified that contained correct XTEN_AF36 segments. The file names of the nucleotide and amino acid constructs for these segments are listed in Table 24.

TABLE 24
DNA and Amino Acid Sequences for 36-mer motifs

| | | SEQ | | SEQ |
|---|---|---|---|---|
| | Amino acid | ID | | ID |
| File_name | sequence | NO: | Nucleotide sequence | NO: |
| LCW0403_004_GFP-N_A01.ab1 | GTSTPESGSASPGT | 787 | GGTACTTCTACTCCGGAAAGCGGTTCC | 831 |
| | SPSGESSTAPGTSP | | GCATCTCCAGGTACTTCTCCTAGCGGT | |
| | SGESSTAP | | GAATCTTCTACTGCTCCAGGTACCTCT | |
| | | | CCTAGCGGCGAATCTTCTACTGCTCCA | |
| LCW0403_005_GFP-N_B01.ab1 | GTSPSGESSTAPGS | 788 | GGTACTTCTCCGAGCGGTGAATCTTCT | 832 |
| | TSSTAESPGPGTSP | | ACCGCACCAGGTTCTACTAGCTCTACC | |
| | SGESSTAP | | GCTGAATCTCCGGGCCCAGGTACTTCT | |
| | | | CCGAGCGGTGAATCTTCTACTGCTCCA | |
| LCW0403_006_GFP-N_C01.ab1 | GSTSSTAESPGPGT | 789 | GGTTCCACCAGCTCTACTGCTGAATCT | 833 |
| | SPSGESSTAPGTST | | CCTGGTCCAGGTACCTCTCCTAGCGGT | |
| | PESGSASP | | GAATCTTCTACTGCTCCAGGTACTTCT | |
| | | | ACTCCTGAAAGCGGCTCTGCTTCTCCA | |
| LCW0403_007_GFP-N_D01.ab1 | GSTSSTAESPGPGS | 790 | GGTTCTACCAGCTCTACTGCAGAATCT | 834 |
| | TSSTAESPGPGTSP | | CCTGGCCCAGGTTCCACCAGCTCTACC | |
| | SGESSTAP | | GCAGAATCTCCGGGTCCAGGTACTTCC | |
| | | | CCTAGCGGTGAATCTTCTACCGCACCA | |
| LCW0403_008_GFP-N_E01.ab1 | GSTSSTAESPGPGT | 791 | GGTTCTACTAGCTCTACTGCTGAATCT | 835 |
| | SPSGESSTAPGTST | | CCTGGCCCAGGTACTTCTCCTAGCGGT | |
| | PESGSASP | | GAATCTTCTACCGCTCCAGGTACCTCT | |
| | | | ACTCCGGAAAGCGGTTCTGCATCTCCA | |
| LCW0403_010_GFP-N_F01.ab1 | GSTSSTAESPGPGT | 792 | GGTTCTACCAGCTCTACCGCAGAATCT | 836 |
| | STPESGSASPGSTS | | CCTGGTCCAGGTACCTCTACTCCGGAA | |
| | ESPSGTAP | | AGCGGCTCTGCATCTCCAGGTTCTACT | |
| | | | AGCGAATCTCCTTCTGGCACTGCACCA | |
| LCW0403_O11_GFP-N_G01.ab1 | GSTSSTAESPGPGT | 793 | GGTTCTACTAGCTCTACTGCAGAATCT | 837 |
| | STPESGSASPGTST | | CCTGGCCCAGGTACCTCTACTCCGGAA | |
| | PESGSASP | | AGCGGCTCTGCATCTCCAGGTACTTCT | |
| | | | ACCCCTGAAAGCGGTTCTGCATCTCCA | |
| LCW0403_012_GFP-N_H01.ab1 | GSTSESPSGTAPGT | 794 | GGTTCTACCAGCGAATCTCCTTCTGGC | 838 |
| | SPSGESSTAPGSTS | | ACCGCTCCAGGTACCTCTCCTAGCGGC | |
| | ESPSGTAP | | GAATCTTCTACCGCTCCAGGTTCTACT | |
| | | | AGCGAATCTCCTTCTGGCACTGCACCA | |
| LCW0403_013_GFP-N_A02.ab1 | GSTSSTAESPGPGS | 795 | GGTTCCACCAGCTCTACTGCAGAATCT | 839 |
| | TSSTAESPGPGTSP | | CCGGGCCCAGGTTCTACTAGCTCTACT | |
| | SGESSTAP | | GCAGAATCTCCGGGTCCAGGTACTTCT | |
| | | | CCTAGCGGCGAATCTTCTACCGCTCCA | |
| LCW0403_014_GFP-N_B02.ab1 | GSTSSTAESPGPGT | 796 | GGTTCCACTAGCTCTACTGCAGAATCT | 840 |
| | STPESGSASPGSTS | | CCTGGCCCAGGTACCTCTACCCCTGAA | |
| | ESPSGTAP | | AGCGGCTCTGCATCTCCAGGTTCTACC | |
| | | | AGCGAATCCCCGTCTGGCACCGCACCA | |
| LCW0403_015_GFP-N_C02.ab1 | GSTSSTAESPGPGS | 797 | GGTTCTACTAGCTCTACTGCTGAATCT | 841 |
| | TSSTAESPGPGTSP | | CCGGGTCCAGGTTCTACCAGCTCTACT | |
| | SGESSTAP | | GCTGAATCTCCTGGTCCAGGTACCTCC | |
| | | | CCGAGCGGTGAATCTTCTACTGCACCA | |
| LCW0403_017_GFP-N_D02.ab1 | GSTSSTAESPGPGS | 798 | GGTTCTACCAGCTCTACCGCTGAATCT | 842 |
| | TSESPSGTAPGSTS | | CCTGGCCCAGGTTCTACCAGCGAATCC | |
| | STAESPGP | | CCGTCTGGCACCGCACCAGGTTCTACT | |
| | | | AGCTCTACCGCTGAATCTCCGGGTCCA | |
| LCW0403_018_GFP-N_E02.ab1 | GSTSSTAESPGPGS | 799 | GGTTCTACCAGCTCTACCGCAGAATCT | 843 |
| | TSSTAESPGPGSTS | | CCTGGCCCAGGTTCCACTAGCTCTACC | |
| | STAESPGP | | GCTGAATCTCCTGGTCCAGGTTCTACT | |
| | | | AGCTCTACCGCTGAATCTCCTGGTCCA | |
| LCW0403_019_GFP-N_F02.ab1 | GSTSESPSGTAPGS | 800 | GGTTCTACTAGCGAATCCCCTTCTGGT | 844 |
| | TSSTAESPGPGSTS | | ACTGCTCCAGGTTCCACTAGCTCTACC | |
| | STAESPGP | | GCTGAATCTCCTGGCCCAGGTTCCACT | |
| | | | AGCTCTACTGCAGAATCTCCTGGTCCA | |
| LCW0403_023_GFP-N_H02.ab1 | GSTSESPSGTAPGS | 801 | GGTTCTACTAGCGAATCTCCTTCTGGT | 845 |
| | TSESPSGTAPGSTS | | ACCGCTCCAGGTTCTACCAGCGAATCC | |
| | ESPSGTAP | | CCGTCTGGTACTGCTCCAGGTTCTACC | |
| | | | AGCGAATCTCCTTCTGGTACTGCACCA | |
| LCW0403_024_GFP-N_A03.ab1 | GSTSSTAESPGPGS | 802 | GGTTCCACCAGCTCTACTGCTGAATCT | 846 |
| | TSSTAESPGPGSTS | | CCTGGCCCAGGTTCTACCAGCTCTACT | |
| | STAESPGP | | GCTGAATCTCCGGGCCCAGGTTCCACC | |
| | | | AGCTCTACCGCTGAATCTCCGGGTCCA | |
| LCW0403_025_GFP-N_B03.ab1 | GSTSSTAESPGPGS | 803 | GGTTCCACTAGCTCTACCGCAGAATCT | 847 |
| | TSSTAESPGPGTSP | | CCTGGTCCAGGTTCTACTAGCTCTACT | |
| | SGESSTAP | | GCTGAATCTCCGGGTCCAGGTACCTCC | |
| | | | CCTAGCGGCGAATCTTCTACCGCTCCA | |
| LCW0403_028_GFP-N_D03.ab1 | GSSPSASTGTGPGS | 804 | GGTTCTAGCCCTTCTGCTTCCACCGGT | 848 |
| | STPSGATGSPGSST | | ACCGGCCCAGGTAGCTCTACTCCGTCT | |
| | PSGATGSP | | GGTGCAACTGGCTCTCCAGGTAGCTCT | |
| | | | ACTCCGTCTGGTGCAACCGGCTCCCCA | |
| LCW0403_029_GFP-N_E03.ab1 | GTSPSGESSTAPGT | 805 | GGTACTTCCCCTAGCGGTGAATCTTCT | 849 |
| | STPESGSASPGSTS | | ACTGCTCCAGGTACCTCTACTCCGGAA | |
| | STAESPGP | | AGCGGCTCCGCATCTCCAGGTTCTACT | |
| | | | AGCTCTACTGCTGAATCTCCTGGTCCA | |
| LCW0403_030_GFP-N_F03.ab1 | GSTSSTAESPGPGS | 806 | GGTTCTACTAGCTCTACCGCTGAATCT | 850 |
| | TSSTAESPGPGTST | | CCGGGTCCAGGTTCTACCAGCTCTACT | |
| | PESGSASP | | GCAGAATCTCCTGGCCCAGGTACTTCT | |
| | | | ACTCCGGAAAGCGGTTCCGCTTCTCCA | |
| LCW0403_031_GFP-N_G03.ab1 | GTSPSGESSTAPGS | 807 | GGTACTTCTCCTAGCGGTGAATCTTCT | 851 |
| | TSSTAESPGPGTST | | ACCGCTCCAGGTTCTACCAGCTCTACT | |
| | PESGSASP | | GCTGAATCTCCTGGCCCAGGTACTTCT | |
| | | | ACCCCGGAAAGCGGCTCCGCTTCTCCA | |
| LCW0403_033_GFP-N_H03.ab1 | GSTSESPSGTAPGS | 808 | GGTTCTACTAGCGAATCCCCTTCTGGT | 852 |
| | TSSTAESPGPGSTS | | ACTGCACCAGGTTCTACCAGCTCTACT | |
| | STAESPGP | | GCTGAATCTCCGGGCCCAGGTTCCACC | |
| | | | AGCTCTACCGCAGAATCTCCTGGTCCA | |
| LCW0403_035_GFP-N_A04.ab1 | GSTSSTAESPGPGS | 809 | GGTTCCACCAGCTCTACCGCTGAATCT | 853 |
| | TSESPSGTAPGSTS | | CCGGGCCCAGGTTCTACCAGCGAATCC | |
| | STAESPGP | | CCTTCTGGCACTGCACCAGGTTCTACT | |
| | | | AGCTCTACCGCAGAATCTCCGGGCCCA | |
| LCW0403_036_GFP-N_B04.ab1 | GSTSSTAESPGPGT | 810 | GGTTCTACCAGCTCTACTGCTGAATCT | 854 |
| | SPSGESSTAPGTST | | CCGGGTCCAGGTACTTCCCCGAGCGGT | |
| | PESGSASP | | GAATCTTCTACTGCACCAGGTACTTCT | |
| | | | ACTCCGGAAAGCGGTTCCGCTTCTCCA | |
| LCW0403_039_GFP-N_C04.ab1 | GSTSESPSGTAPGS | 811 | GGTTCTACCAGCGAATCTCCTTCTGGC | 855 |
| | TSESPSGTAPGTSP | | ACCGCTCCAGGTTCTACTAGCGAATCC | |
| | SGESSTAP | | CCGTCTGGTACCGCACCAGGTACTTCT | |
| | | | CCTAGCGGCGAATCTTCTACCGCACCA | |
| LCW0403_041_GFP-N_D04.ab1 | GSTSESPSGTAPGS | 812 | GGTTCTACCAGCGAATCCCCTTCTGGT | 856 |
| | TSESPSGTAPGTST | | ACTGCTCCAGGTTCTACCAGCGAATCC | |
| | PESGSASP | | CCTTCTGGCACCGCACCAGGTACTTCT | |
| | | | ACCCCTGAAAGCGGCTCCGCTTCTCCA | |
| LCW0403_044_GFP-N_E04.ab1 | GTSTPESGSASPGS | 813 | GGTACCTCTACTCCTGAAAGCGGTTCT | 857 |
| | TSSTAESPGPGSTS | | GCATCTCCAGGTTCCACTAGCTCTACC | |
| | STAESPGP | | GCAGAATCTCCGGGCCCAGGTTCTACT | |
| | | | AGCTCTACTGCTGAATCTCCTGGCCCA | |
| LCW0403_046_GFP-N_F04.ab1 | GSTSESPSGTAPGS | 814 | GGTTCTACCAGCGAATCCCCTTCTGGC | 858 |
| | TSESPSGTAPGTSP | | ACTGCACCAGGTTCTACTAGCGAATCC | |
| | SGESSTAP | | CCTTCTGGTACCGCACCAGGTACTTCT | |
| | | | CCGAGCGGCGAATCTTCTACTGCTCCA | |
| LCW0403_047_GFP-N_G04.ab1 | GSTSSTAESPGPGS | 815 | GGTTCTACTAGCTCTACCGCTGAATCT | 859 |
| | TSSTAESPGPGSTS | | CCTGGCCCAGGTTCCACTAGCTCTACC | |
| | ESPSGTAP | | GCAGAATCTCCGGGCCCAGGTTCTACT | |
| | | | AGCGAATCCCCTTCTGGTACCGCTCCA | |
| LCW0403_049_GFP-N_H04.ab1 | GSTSSTAESPGPGS | 816 | GGTTCCACCAGCTCTACTGCAGAATCT | 860 |
| | TSSTAESPGPGTST | | CCTGGCCCAGGTTCTACTAGCTCTACC | |
| | PESGSASP | | GCAGAATCTCCTGGTCCAGGTACCTCT | |
| | | | ACTCCTGAAAGCGGTTCCGCATCTCCA | |
| LCW0403_051_GFP-N_A05.ab1 | GSTSSTAESPGPGS | 817 | GGTTCTACTAGCTCTACTGCTGAATCT | 861 |
| | TSSTAESPGPGSTS | | CCGGGCCCAGGTTCTACTAGCTCTACC | |
| | ESPSGTAP | | GCTGAATCTCCGGGTCCAGGTTCTACT | |
| | | | AGCGAATCTCCTTCTGGTACCGCTCCA | |
| LCW0403_053_GFP-N_B05.ab1 | GTSPSGESSTAPGS | 818 | GGTACCTCCCCGAGCGGTGAATCTTCT | 862 |
| | TSESPSGTAPGSTS | | ACTGCACCAGGTTCTACTAGCGAATCC | |
| | STAESPGP | | CCTTCTGGTACTGCTCCAGGTTCCACC | |
| | | | AGCTCTACTGCAGAATCTCCGGGTCCA | |
| LCW0403_054_GFP-N_C05.ab1 | GSTSESPSGTAPGT | 819 | GGTTCTACTAGCGAATCCCCGTCTGGT | 863 |
| | SPSGESSTAPGSTS | | ACTGCTCCAGGTACTTCCCCTAGCGGT | |
| | STAESPGP | | GAATCTTCTACTGCTCCAGGTTCTACC | |
| | | | AGCTCTACCGCAGAATCTCCGGGTCCA | |
| LCW0403_057_GFP-N_D05.ab1 | GSTSSTAESPGPGS | 820 | GGTTCTACCAGCTCTACCGCTGAATCT | 864 |
| | TSESPSGTAPGTSP | | CCTGGCCCAGGTTCTACTAGCGAATCT | |
| | SGESSTAP | | CCGTCTGGCACCGCACCAGGTACTTCC | |
| | | | CCTAGCGGTGAATCTTCTACTGCACCA | |
| LCW0403_058_GFP-N_E05.ab1 | GSTSESPSGTAPGS | 821 | GGTTCTACTAGCGAATCTCCTTCTGGC | 865 |
| | TSESPSGTAPGTST | | ACTGCACCAGGTTCTACCAGCGAATCT | |
| | PESGSASP | | CCGTCTGGCACTGCACCAGGTACCTCT | |
| | | | ACCCCTGAAAGCGGTTCCGCTTCTCCA | |
| LCW0403_060_GFP-N_F05.ab1 | GTSTPESGSASPGS | 822 | GGTACCTCTACTCCGGAAAGCGGTTCC | 866 |
| | TSESPSGTAPGSTS | | GCATCTCCAGGTTCTACCAGCGAATCC | |
| | STAESPGP | | CCGTCTGGCACCGCACCAGGTTCTACT | |
| | | | AGCTCTACTGCTGAATCTCCGGGCCCA | |
| LCW0403_063_GFP-N_G05.ab1 | GSTSSTAESPGPGT | 823 | GGTTCTACTAGCTCTACTGCAGAATCT | 867 |
| | SPSGESSTAPGTSP | | CCGGGCCCAGGTACCTCTCCTAGCGGT | |
| | SGESSTAP | | GAATCTTCTACCGCTCCAGGTACTTCT | |
| | | | CCGAGCGGTGAATCTTCTACCGCTCCA | |
| LCW0403_064_GFP-N_H05.ab1 | GTSPSGESSTAPGT | 824 | GGTACCTCCCCTAGCGGCGAATCTTCT | 868 |
| | SPSGESSTAPGTSP | | ACTGCTCCAGGTACCTCTCCTAGCGGC | |
| | SGESSTAP | | GAATCTTCTACCGCTCCAGGTACCTCC | |
| | | | CCTAGCGGTGAATCTTCTACCGCACCA | |
| LCW0403_065_GFP-N_A06.ab1 | GSTSSTAESPGPGT | 825 | GGTTCCACTAGCTCTACTGCTGAATCT | 869 |
| | STPESGSASPGSTS | | CCTGGCCCAGGTACTTCTACTCCGGAA | |
| | ESPSGTAP | | AGCGGTTCCGCTTCTCCAGGTTCTACT | |
| | | | AGCGAATCTCCGTCTGGCACCGCACCA | |
| LCW0403_066_GFP-N_B06.ab1 | GSTSESPSGTAPGT | 826 | GGTTCTACTAGCGAATCTCCGTCTGGC | 870 |
| | SPSGESSTAPGTSP | | ACTGCTCCAGGTACTTCTCCTAGCGGT | |
| | SGESSTAP | | GAATCTTCTACCGCTCCAGGTACTTCC | |
| | | | CCTAGCGGCGAATCTTCTACCGCTCCA | |
| LCW0403_067_GFP-N_C06.ab1 | GSTSESPSGTAPGT | 827 | GGTTCTACTAGCGAATCTCCTTCTGGT | 871 |
| | STPESGSASPGSTS | | ACCGCTCCAGGTACTTCTACCCCTGAA | |
| | STAESPGP | | AGCGGCTCCGCTTCTCCAGGTTCCACT | |
| | | | AGCTCTACCGCTGAATCTCCGGGTCCA | |
| LCW0403_068_GFP-N_D06.ab1 | GSTSSTAESPGPGS | 828 | GGTTCCACTAGCTCTACTGCTGAATCT | 872 |
| | TSSTAESPGPGSTS | | CCTGGCCCAGGTTCTACCAGCTCTACC | |
| | ESPSGTAP | | GCTGAATCTCCTGGCCCAGGTTCTACC | |
| | | | AGCGAATCTCCGTCTGGCACCGCACCA | |
| LCW0403_069_GFP-N_E06.ab1 | GSTSESPSGTAPGT | 829 | GGTTCTACTAGCGAATCCCCGTCTGGT | 873 |
| | STPESGSASPGTST | | ACCGCACCAGGTACTTCTACCCCGGAA | |
| | PESGSASP | | AGCGGCTCTGCTTCTCCAGGTACTTCT | |
| | | | ACCCCGGAAAGCGGCTCCGCATCTCCA | |
| LCW0403_070_GFP-N_F06.ab1 | GSTSESPSGTAPGT | 830 | GGTTCTACTAGCGAATCCCCGTCTGGT | 874 |
| | STPESGSASPGTST | | ACTGCTCCAGGTACTTCTACTCCTGAA | |
| | PESGSASP | | AGCGGTTCCGCTTCTCCAGGTACCTCT | |
| | | | ACTCCGGAAAGCGGTTCTGCATCTCCA | |

### Example 4: Construction of XTEN_AG36 Segments

[0444] A codon library encoding sequences of 36 amino acid length was constructed. The sequences were designated XTEN_AG36. Its segments have the amino acid sequence [X]₃ where X is a 12mer peptide with the sequence: GTPGSGTASSSP (SEQ ID NO: 38), GSSTPSGATGSP (SEQ ID NO: 39), GSSPSASTGTGP (SEQ ID NO: 40), or GASPGTSSTGSP (SEQ ID NO: 41). The insert was obtained by annealing the following pairs of phosphorylated synthetic oligonucleotide pairs:

AG1for:
(SEQ ID NO: 875)
AGGTACYCCKGGYAGCGGTACYGCWTCTTCYTCTCC
AG1rev:
(SEQ ID NO: 876)
ACCTGGAGARGAAGAWGCRGTACCGCTRCCMGGRGT
AG2for:
(SEQ ID NO: 877)
AGGTAGCTCTACYCCKTCTGGTGCWACYGGYTCYCC
AG2rev:
(SEQ ID NO: 878)
ACCTGGRGARCCRGTWGCACCAGAMGGRGTAGAGCT
AG3for:
(SEQ ID NO: 879)
AGGTTCTAGCCCKTCTGCWTCYACYGGTACYGGYCC
AG3rev:
(SEQ ID NO: 880)
ACCTGGRCCRGTACCRGTRGAWGCAGAMGGGCTAGA
AG4for:
(SEQ ID NO: 881)
AGGTGCWTCYCCKGGYACYAGCTCTACYGGTTCTCC
AG4rev:
(SEQ ID NO: 882)
ACCTGGAGAACCRGTAGAGCTRGTRCCMGGRGAWGC

[0445] We also annealed the phosphorylated oligonucleotide 3KpnIstopperFor: AGGTNCGTCTTCACTCGAGGGTAC (SEQ ID NO: 619) and the non-phosphorylated oligonucleotide pr_3KpnIstopperRev: CCTCGAGTGAAGACGA (SEQ ID NO: 620). The annealed oligonucleotide pairs were ligated, which resulted in a mixture of products with varying length that represents the varying number of 12mer repeats ligated to one BbsI/KpnI segment. The products corresponding to the length of 36 amino acids were isolated from the mixture by preparative agarose gel electrophoresis and ligated into the BsaI/KpnI digested stuffier vector pCW0359. Most of the clones in the resulting library designated LCW44 showed green fluorescence after induction which shows that the sequence of XTEN_AG36 had been ligated in frame with the GFP gene and most sequences of XTEN_AG36 show good expression.

[0446] We screened isolates from library LCW0404 for high level of fluorescence by stamping them onto agar plate containing IPTG. The same isolates were evaluated by PCR and 48 isolates were identified that contained segments with 36 amino acids as well as strong fluorescence. These isolates were sequenced and 44 clones were identified that contained correct XTEN_AG36 segments. The file names of the nucleotide and amino acid constructs and the sequences for these segments are listed in Table 25.

TABLE 25
DNA and Amino Acid Sequences for 36-mer motifs

| | | SEQ | | SEQ |
|---|---|---|---|---|
| | Amino acid | ID | | ID |
| File name | sequence | NO: | Nucleotide sequence | NO: |
| LCW0404_001_GFP-N_A07.ab1 | GASPGTSSTGSPGT | 883 | GGTGCATCCCCGGGCACTAGCTCTACC | 927 |
| | PGSGTASSSPGSST | | GGTTCTCCAGGTACTCCTGGTAGCGGT | |
| | PSGATGSP | | ACTGCTTCTTCTTCTCCAGGTAGCTCT | |
| | | | ACTCCTTCTGGTGCTACTGGTTCTCCA | |
| LCW0404_003_GFP-N_B07.ab1 | GSSTPSGATGSPGS | 884 | GGTAGCTCTACCCCTTCTGGTGCTACC | 928 |
| | SPSASTGTGPGSST | | GGCTCTCCAGGTTCTAGCCCGTCTGCT | |
| | PSGATGSP | | TCTACCGGTACCGGTCCAGGTAGCTCT | |
| | | | ACCCCTTCTGGTGCTACTGGTTCTCCA | |
| LCW0404_006_GFP-N_C07.ab1 | GASPGTSSTGSPGS | 885 | GGTGCATCTCCGGGTACTAGCTCTACC | 929 |
| | SPSASTGTGPGSST | | GGTTCTCCAGGTTCTAGCCCTTCTGCT | |
| | PSGATGSP | | TCCACTGGTACCGGCCCAGGTAGCTCT | |
| | | | ACCCCGTCTGGTGCTACTGGTTCCCCA | |
| LCW0404_007_GFP-N_D07.ab1 | GTPGSGTASSSPGS | 886 | GGTACTCCGGGCAGCGGTACTGCTTCT | 930 |
| | STPSGATGSPGASP | | TCCTCTCCAGGTAGCTCTACCCCTTCT | |
| | GTSSTGSP | | GGTGCAACTGGTTCCCCAGGTGCATCC | |
| | | | CCTGGTACTAGCTCTACCGGTTCTCCA | |
| LCW0404_009_GFP-N_E07.ab1 | GTPGSGTASSSPGA | 887 | GGTACCCCTGGCAGCGGTACTGCTTCT | 931 |
| | SPGTSSTGSPGSRP | | TCTTCTCCAGGTGCTTCCCCTGGTACC | |
| | SASTGTGP | | AGCTCTACCGGTTCTCCAGGTTCTAGA | |
| | | | CCTTCTGCATCCACCGGTACTGGTCCA | |
| LCW0404_011_GFP-N_F07.ab1 | GASPGTSSTGSPGS | 888 | GGTGCATCTCCTGGTACCAGCTCTACC | 932 |
| | STPSGATGSPGASP | | GGTTCTCCAGGTAGCTCTACTCCTTCT | |
| | GTSSTGSP | | GGTGCTACTGGCTCTCCAGGTGCTTCC | |
| | | | CCGGGTACCAGCTCTACCGGTTCTCCA | |
| LCW0404_012_GFP-N_G07.ab1 | GTPGSGTASSSPGS | 889 | GGTACCCCGGGCAGCGGTACCGCATCT | 933 |
| | STPSGATGSPGSST | | TCCTCTCCAGGTAGCTCTACCCCGTCT | |
| | PSGATGSP | | GGTGCTACCGGTTCCCCAGGTAGCTCT | |
| | | | ACCCCGTCTGGTGCAACCGGCTCCCCA | |
| LCW0404_014_GFP-N_H07.ab1 | GASPGTSSTGSPGA | 890 | GGTGCATCTCCGGGCACTAGCTCTACT | 934 |
| | SPGTSSTGSPGASP | | GGTTCTCCAGGTGCATCCCCTGGCACT | |
| | GTSSTGSP | | AGCTCTACTGGTTCTCCAGGTGCTTCT | |
| | | | CCTGGTACCAGCTCTACTGGTTCTCCA | |
| LCW0404_015_GFP-N_A08.ab1 | GSSTPSGATGSPGS | 891 | GGTAGCTCTACTCCGTCTGGTGCAACC | 935 |
| | SPSASTGTGPGASP | | GGCTCCCCAGGTTCTAGCCCGTCTGCT | |
| | GTSSTGSP | | TCCACTGGTACTGGCCCAGGTGCTTCC | |
| | | | CCGGGCACCAGCTCTACTGGTTCTCCA | |
| LCW0404_016_GFP-N_B08.ab1 | GSSTPSGATGSPGS | 892 | GGTAGCTCTACTCCTTCTGGTGCTACC | 936 |
| | STPSGATGSPGTPG | | GGTTCCCCAGGTAGCTCTACTCCTTCT | |
| | SGTASSSP | | GGTGCTACTGGTTCCCCAGGTACTCCG | |
| | | | GGCAGCGGTACTGCTTCTTCCTCTCCA | |
| LCW0404_017_GFP-N_C08.ab1 | GSSTPSGATGSPGS | 893 | GGTAGCTCTACTCCGTCTGGTGCAACC | 937 |
| | STPSGATGSPGASP | | GGTTCCCCAGGTAGCTCTACTCCTTCT | |
| | GTSSTGSP | | GGTGCTACTGGCTCCCCAGGTGCATCC | |
| | | | CCTGGCACCAGCTCTACCGGTTCTCCA | |
| LCW0404_018_GFP-N_D08.ab1 | GTPGSGTASSSPGS | 894 | GGTACTCCTGGTAGCGGTACCGCATCT | 938 |
| | SPSASTGTGPGSST | | TCCTCTCCAGGTTCTAGCCCTTCTGCA | |
| | PSGATGSP | | TCTACCGGTACCGGTCCAGGTAGCTCT | |
| | | | ACTCCTTCTGGTGCTACTGGCTCTCCA | |
| LCW0404_023_GFP-N_F08.ab1 | GASPGTSSTGSPGS | 895 | GGTGCTTCCCCGGGCACTAGCTCTACC | 939 |
| | SPSASTGTGPGTPG | | GGTTCTCCAGGTTCTAGCCCTTCTGCA | |
| | SGTASSSP | | TCTACTGGTACTGGCCCAGGTACTCCG | |
| | | | GGCAGCGGTACTGCTTCTTCCTCTCCA | |
| LCW0404_025_GFP-N_G08.ab1 | GSSTPSGATGSPGS | 896 | GGTAGCTCTACTCCGTCTGGTGCTACC | 940 |
| | STPSGATGSPGASP | | GGCTCTCCAGGTAGCTCTACCCCTTCT | |
| | GTSSTGSP | | GGTGCAACCGGCTCCCCAGGTGCTTCT | |
| | | | CCGGGTACCAGCTCTACTGGTTCTCCA | |
| LCW0404_029_GFP-N_A09.ab1 | GTPGSGTASSSPGS | 897 | GGTACCCCTGGCAGCGGTACCGCTTCT | 941 |
| | STPSGATGSPGSSP | | TCCTCTCCAGGTAGCTCTACCCCGTCT | |
| | SASTGTGP | | GGTGCTACTGGCTCTCCAGGTTCTAGC | |
| | | | CCGTCTGCATCTACCGGTACCGGCCCA | |
| LCW0404_030_GFP-N_B09.ab1 | GSSTPSGATGSPGT | 898 | GGTAGCTCTACTCCTTCTGGTGCAACC | 942 |
| | PGSGTASSSPGTPG | | GGCTCCCCAGGTACCCCGGGCAGCGGT | |
| | SGTASSSP | | ACCGCATCTTCCTCTCCAGGTACTCCG | |
| | | | GGTAGCGGTACTGCTTCTTCTTCTCCA | |
| LCW0404_031_GFP-N_C09.ab1 | GTPGSGTASSSPGS | 899 | GGTACCCCGGGTAGCGGTACTGCTTCT | 943 |
| | STPSGATGSPGASP | | TCCTCTCCAGGTAGCTCTACCCCTTCT | |
| | GTSSTGSP | | GGTGCAACCGGCTCTCCAGGTGCTTCT | |
| | | | CCGGGCACCAGCTCTACCGGTTCTCCA | |
| LCW0404_034_GFP-N_D09.ab1 | GSSTPSGATGSPGS | 900 | GGTAGCTCTACCCCGTCTGGTGCTACC | 944 |
| | STPSGATGSPGASP | | GGCTCTCCAGGTAGCTCTACCCCGTCT | |
| | GTSSTGSP | | GGTGCAACCGGCTCCCCAGGTGCATCC | |
| | | | CCGGGTACTAGCTCTACCGGTTCTCCA | |
| LCW0404_035_GFP-N_E09.ab1 | GASPGTSSTGSPGT | 901 | GGTGCTTCTCCGGGCACCAGCTCTACT | 945 |
| | PGSGTASSSPGSST | | GGTTCTCCAGGTACCCCGGGCAGCGGT | |
| | PSGATGSP | | ACCGCATCTTCTTCTCCAGGTAGCTCT | |
| | | | ACTCCTTCTGGTGCAACTGGTTCTCCA | |
| LCW0404_036_GFP-N_F09.ab1 | GSSPSASTGTGPGS | 902 | GGTTCTAGCCCGTCTGCTTCCACCGGT | 946 |
| | STPSGATGSPGTPG | | ACTGGCCCAGGTAGCTCTACCCCGTCT | |
| | SGTASSSP | | GGTGCAACTGGTTCCCCAGGTACCCCT | |
| | | | GGTAGCGGTACCGCTTCTTCTTCTCCA | |
| LCW0404_037_GFP-N_G09.ab1 | GASPGTSSTGSPGS | 903 | GGTGCTTCTCCGGGCACCAGCTCTACT | 947 |
| | SPSASTGTGPGSST | | GGTTCTCCAGGTTCTAGCCCTTCTGCA | |
| | PSGATGSP | | TCCACCGGTACCGGTCCAGGTAGCTCT | |
| | | | ACCCCTTCTGGTGCAACCGGCTCTCCA | |
| LCW0404_040_GFP-N_H09.abi | GASPGTSSTGSPGS | 904 | GGTGCATCCCCGGGCACCAGCTCTACC | 948 |
| | STPSGATGSPGSST | | GGTTCTCCAGGTAGCTCTACCCCGTCT | |
| | PSGATGSP | | GGTGCTACCGGCTCTCCAGGTAGCTCT | |
| | | | ACCCCGTCTGGTGCTACTGGCTCTCCA | |
| LCW0404_041_GFP-N_A10.ab1 | GTPGSGTASSSPGS | 905 | GGTACCCCTGGTAGCGGTACTGCTTCT | 949 |
| | STPSGATGSPGTPG | | TCCTCTCCAGGTAGCTCTACTCCGTCT | |
| | SGTASSSP | | GGTGCTACCGGTTCTCCAGGTACCCCG | |
| | | | GGTAGCGGTACCGCATCTTCTTCTCCA | |
| LCW0404_043_GFP-N_C10.ab1 | GSSPSASTGTGPGS | 906 | GGTTCTAGCCCTTCTGCTTCCACCGGT | 950 |
| | STPSGATGSPGSST | | ACTGGCCCAGGTAGCTCTACCCCTTCT | |
| | PSGATGSP | | GGTGCTACCGGCTCCCCAGGTAGCTCT | |
| | | | ACTCCTTCTGGTGCAACTGGCTCTCCA | |
| LCW0404_045_GFP-N_D10.ab1 | GASPGTSSTGSPGS | 907 | GGTGCTTCTCCTGGCACCAGCTCTACT | 951 |
| | SPSASTGTGPGSSP | | GGTTCTCCAGGTTCTAGCCCTTCTGCT | |
| | SASTGTGP | | TCTACCGGTACTGGTCCAGGTTCTAGC | |
| | | | CCTTCTGCATCCACTGGTACTGGTCCA | |
| LCW0404_047_GFP-N_F10.ab1 | GTPGSGTASSSPGA | 908 | GGTACTCCTGGCAGCGGTACCGCTTCT | 952 |
| | SPGTSSTGSPGASP | | TCTTCTCCAGGTGCTTCTCCTGGTACT | |
| | GTSSTGSP | | AGCTCTACTGGTTCTCCAGGTGCTTCT | |
| | | | CCGGGCACTAGCTCTACTGGTTCTCCA | |
| LCW0404_048_GFP-N_G10.ab1 | GSSTPSGATGSPGA | 909 | GGTAGCTCTACCCCGTCTGGTGCTACC | 953 |
| | SPGTSSTGSPGSST | | GGTTCCCCAGGTGCTTCTCCTGGTACT | |
| | PSGATGSP | | AGCTCTACCGGTTCTCCAGGTAGCTCT | |
| | | | ACCCCGTCTGGTGCTACTGGCTCTCCA | |
| LCW0404_049_GFP-N_H10.ab1 | GSSTPSGATGSPGT | 910 | GGTAGCTCTACCCCGTCTGGTGCTACT | 954 |
| | PGSGTASSSPGSST | | GGTTCTCCAGGTACTCCGGGCAGCGGT | |
| | PSGATGSP | | ACTGCTTCTTCCTCTCCAGGTAGCTCT | |
| | | | ACCCCTTCTGGTGCTACTGGCTCTCCA | |
| LCW0404_050_GFP-N_A11.ab1 | GASPGTSSTGSPGS | 911 | GGTGCATCTCCTGGTACCAGCTCTACT | 955 |
| | SPSASTGTGPGSST | | GGTTCTCCAGGTTCTAGCCCTTCTGCT | |
| | PSGATGSP | | TCTACCGGTACCGGTCCAGGTAGCTCT | |
| | | | ACTCCTTCTGGTGCTACCGGTTCTCCA | |
| LCW0404_051_GFP-N_B11.ab1 | GSSTPSGATGSPGS | 912 | GGTAGCTCTACCCCGTCTGGTGCTACT | 956 |
| | STPSGATGSPGSST | | GGCTCTCCAGGTAGCTCTACTCCTTCT | |
| | PSGATGSP | | GGTGCTACTGGTTCCCCAGGTAGCTCT | |
| | | | ACCCCGTCTGGTGCAACTGGCTCTCCA | |
| LCW0404_052_GFP-N_C11.ab1 | GASPGTSSTGSPGT | 913 | GGTGCATCCCCGGGTACCAGCTCTACC | 957 |
| | PGSGTASSSPGASP | | GGTTCTCCAGGTACTCCTGGCAGCGGT | |
| | GTSSTGSP | | ACTGCATCTTCCTCTCCAGGTGCTTCT | |
| | | | CCGGGCACCAGCTCTACTGGTTCTCCA | |
| LCW0404_053_GFP-N_D11.ab1 | GSSTPSGATGSPGS | 914 | GGTAGCTCTACTCCTTCTGGTGCAACT | 958 |
| | SPSASTGTGPGASP | | GGTTCTCCAGGTTCTAGCCCGTCTGCA | |
| | GTSSTGSP | | TCCACTGGTACCGGTCCAGGTGCTTCC | |
| | | | CCTGGCACCAGCTCTACCGGTTCTCCA | |
| LCW0404_057_GFP-N_E11.ab1 | GASPGTSSTGSPGS | 915 | GGTGCATCTCCTGGTACTAGCTCTACT | 959 |
| | STPSGATGSPGSSP | | GGTTCTCCAGGTAGCTCTACTCCGTCT | |
| | SASTGTGP | | GGTGCAACCGGCTCTCCAGGTTCTAGC | |
| | | | CCTTCTGCATCTACCGGTACTGGTCCA | |
| LCW0404_060_GFP-N_F11.ab1 | GTPGSGTASSSPGS | 916 | GGTACTCCTGGCAGCGGTACCGCATCT | 960 |
| | STPSGATGSPGASP | | TCCTCTCCAGGTAGCTCTACTCCGTCT | |
| | GTSSTGSP | | GGTGCAACTGGTTCCCCAGGTGCTTCT | |
| | | | CCGGGTACCAGCTCTACCGGTTCTCCA | |
| LCW0404_062_GFP-N_G11.ab1 | GSSTPSGATGSPGT | 917 | GGTAGCTCTACCCCGTCTGGTGCAACC | 961 |
| | PGSGTASSSPGSST | | GGCTCCCCAGGTACTCCTGGTAGCGGT | |
| | PSGATGSP | | ACCGCTTCTTCTTCTCCAGGTAGCTCT | |
| | | | ACTCCGTCTGGTGCTACCGGCTCCCCA | |
| LCW0404_066_GFP-N_H11.ab1 | GSSPSASTGTGPGS | 918 | GGTTCTAGCCCTTCTGCATCCACCGGT | 962 |
| | SPSASTGTGPGASP | | ACCGGCCCAGGTTCTAGCCCGTCTGCT | |
| | GTSSTGSP | | TCTACCGGTACTGGTCCAGGTGCTTCT | |
| | | | CCGGGTACTAGCTCTACTGGTTCTCCA | |
| LCW0404_067_GFP-N_A12.ab1 | GTPGSGTASSSPGS | 919 | GGTACCCCGGGTAGCGGTACCGCTTCT | 963 |
| | STPSGATGSPGSNP | | TCTTCTCCAGGTAGCTCTACTCCGTCT | |
| | SASTGTGP | | GGTGCTACCGGCTCTCCAGGTTCTAAC | |
| | | | CCTTCTGCATCCACCGGTACCGGCCCA | |
| LCW0404_068_GFP-N_B12.ab1 | GSSPSASTGTGPGS | 920 | GGTTCTAGCCCTTCTGCATCTACTGGT | 964 |
| | STPSGATGSPGASP | | ACTGGCCCAGGTAGCTCTACTCCTTCT | |
| | GTSSTGSP | | GGTGCTACCGGCTCTCCAGGTGCTTCT | |
| | | | CCGGGTACTAGCTCTACCGGTTCTCCA | |
| LCW0404_069_GFP-N_C12.ab1 | GSSTPSGATGSPGA | 921 | GGTAGCTCTACCCCTTCTGGTGCAACC | 965 |
| | SPGTSSTGSPGTPG | | GGCTCTCCAGGTGCATCCCCGGGTACC | |
| | SGTASSSP | | AGCTCTACCGGTTCTCCAGGTACTCCG | |
| | | | GGTAGCGGTACCGCTTCTTCCTCTCCA | |
| LCW0404_070_GFP-N_D12.ab1 | GSSTPSGATGSPGS | 922 | GGTAGCTCTACTCCGTCTGGTGCAACC | 966 |
| | STPSGATGSPGSST | | GGTTCCCCAGGTAGCTCTACCCCTTCT | |
| | PSGATGSP | | GGTGCAACCGGCTCCCCAGGTAGCTCT | |
| | | | ACCCCTTCTGGTGCAACTGGCTCTCCA | |
| LCW0404_073_GFP-N_E12.ab1 | GASPGTSSTGSPGT | 923 | GGTGCTTCTCCTGGCACTAGCTCTACC | 967 |
| | PGSGTASSSPGSST | | GGTTCTCCAGGTACCCCTGGTAGCGGT | |
| | PSGATGSP | | ACCGCATCTTCCTCTCCAGGTAGCTCT | |
| | | | ACTCCTTCTGGTGCTACTGGTTCCCCA | |
| LCW0404_075_GFP-N_F12_abl | GSSTPSGATGSPGS | 924 | GGTAGCTCTACCCCGTCTGGTGCTACT | 968 |
| | SPSASTGTGPGSSP | | GGCTCCCCAGGTTCTAGCCCTTCTGCA | |
| | SASTGTGP | | TCCACCGGTACCGGTCCAGGTTCTAGC | |
| | | | CCGTCTGCATCTACTGGTACTGGTCCA | |
| LCW0404_080_GFP-N_G12.ab1 | GASPGTSSTGSPGS | 925 | GGTGCTTCCCCGGGCACCAGCTCTACT | 969 |
| | SPSASTGTGPGSSP | | GGTTCTCCAGGTTCTAGCCCGTCTGCT | |
| | SASTGTGP | | TCTACTGGTACTGGTCCAGGTTCTAGC | |
| | | | CCTTCTGCTTCCACTGGTACTGGTCCA | |
| LCW0404_081_GFP-N_H12.ab1 | GASPGTSSTGSPGS | 926 | GGTGCTTCCCCGGGTACCAGCTCTACC | 970 |
| | SPSASTGTGPGTPG | | GGTTCTCCAGGTTCTAGCCCTTCTGCT | |
| | SGTASSSP | | TCTACCGGTACCGGTCCAGGTACCCCT | |
| | | | GGCAGCGGTACCGCATCTTCCTCTCCA | |

### Example 5: Construction of XTEN_AE864

[0447] XTEN_AE864 was constructed from serial dimerization of XTEN_AE36 to AE72, 144, 288, 576 and 864. A collection of XTEN_AE72 segments was constructed from 37 different segments of XTEN_AE36. Cultures of E. coli harboring all 37 different 36-amino acid segments were mixed and plasmid was isolated. This plasmid pool was digested with BsaI/NcoI to generate the small fragment as the insert. The same plasmid pool was digested with BbsI/NcoI to generate the large fragment as the vector. The insert and vector fragments were ligated resulting in a doubling of the length and the ligation mixture was transformed into BL21Gold(DE3) cells to obtain colonies of XTEN_AE72.

[0448] This library of XTEN_AE72 segments was designated LCW0406. All clones from LCW0406 were combined and dimerized again using the same process as described above yielding library LCW0410 of XTEN_AE144. All clones from LCW0410 were combined and dimerized again using the same process as described above yielding library LCW0414 of XTEN_AE288. Two isolates LCW0414.001 and LCW0414.002 were randomly picked from the library and sequenced to verify the identities. All clones from LCW0414 were combined and dimerized again using the same process as described above yielding library LCW0418 of XTEN_AE576. We screened 96 isolates from library LCW0418 for high level of GFP fluorescence. 8 isolates with right sizes of inserts by PCR and strong fluorescence were sequenced and 2 isolates (LCW0418.018 and LCW0418.052) were chosen for future use based on sequencing and expression data.

[0449] The specific clone pCW0432 of XTEN_AE864 was constructed by combining LCW0418.018 of XTEN_AE576 and LCW0414.002 of XTEN_AE288 using the same dimerization process as described above.

### Example 6: Construction of XTEN_AG864

[0450] Using the several consecutive rounds of dimerization, we assembled a collection of XTEN_AG864 sequences starting from segments of XTEN_AD36 listed in Example 1. These sequences were assembled as described in Example 3. Several isolates from XTEN_AG864 were evaluated and found to show good expression and excellent solubility under physiological conditions. A full length clone of XTEN_AG864 had excellent solubility and showed half-life exceeding 60 h in cynomolgus monkeys.

### Example 7: Construction of CBD-XTEN-Cys, a Cysteine-Engineered XTEN

[0451] A cysteine island (CysIsland) encoding the amino acid sequence GGSPAGSCTSP (SEQ ID NO: 187) containing one cysteine was introduced by annealed oligos in the CBD-stuffer-GFP vector to obtain CBD-CysIsland-GFP, where CysIsland is flanked by the restriction sites BsaI and BbsI. The CBD-stuffer-GFP vector is a pET30 derivative from Novagen with TEV protease recognition site between CBD and the stuffer. Constructs were previously generated by replacing the stuffer in CBD-stuffer-GFP vector with genes encoding XTEN_AE288 and XTEN_AE576. The plasmid of CBD-XTEN_AE288-GFP was digested with BsaI/NcoI to generate the small fragment as the insert. The plasmid of CBD-CysIsland-GFP was digested with BbsI/NcoI to generate the large fragment as the vector. The insert and vector fragments were ligated and the ligation mixture was electroporated into BL21-Gold (DE3) cells to obtain transformants of CBD-CysIsland-XTEN_AE288-GFP. Similarly, the plasmid of CBD-CysIsland-XTEN_AE288-GFP was digested with BsaI/NcoI to generate the small fragment as the insert. The plasmid of CBD-XTEN_AE576-GFP was digested with BbsI/NcoI to generate the large fragment as the vector. The insert and vector fragments were ligated and the ligation mixture was electroporated into BL21-Gold (DE3) cells to obtain transformants of CBD-XTEN_AE576-CysIsland-XTEN_AE288-GFP. Finally, the plasmid of CBD-XTEN_AE576-CysIsland-XTEN_AE288-GFP was digested with BbsI/HindIII to remove GFP and ligate with annealed oligos for the stop codon, and the ligation mixture was electroporated into BL21-Gold (DE3) cells to obtain transformants of CBD-XTEN_AE576-CysIsland-XTEN_AE288, which has the DNA and encoded amino acid sequences that follow in Table 26. Additional constructs can be created with cysteines inserted at different locations within the XTEN sequence by the selection of restriction sites appropriate for the given location, including multiple insertions. The method could also be utilized to create lysine-engineered XTEN by substitution of codons encoding lysine for those encoding cysteine in the oligonucleotides.

TABLE 26
DNA and amino acid sequence of Cys-engineered XTEN

| Clone | | Amino Acid |
|---|---|---|
| Name | DNA Sequence | Sequence |
| CBD-TEV- | ATGGCAAATACACCGGTATCAGGCAATTTGAAGGTTGA | MANTPVSGNLKV |
| AE576- | ATTCTACAACAGCAATCCTTCAGATACTACTAACTCAA | EFYNSNPSDTTN |
| CysIsland- | TCAATCCTCAGTTCAAGGTTACTAATACCGGAAGCAGT | SINPQFKVTNTG |
| AE288 | GCAATTGATTTGTCCAAACTCACATTGAGATATTATTA | SSAIDLSKLTLR |
| | TACAGTAGACGGACAGAAAGATCAGACCTTCTGGGCTG | YYYTVDGQKDQT |
| | ACCATGCTGCAATAATCGGCAGTAACGGCAGCTACAAC | FWADHAAIIGSN |
| | GGAATTACTTCAAATGTAAAAGGAACATTTGTAAAAAT | GSYNGITSNVKG |
| | GAGTTCCTCAACAAATAACGCAGACACCTACCTTGAAA | TFVKMSSSTNNA |
| | TCAGCTTTACAGGCGGAACTCTTGAACCGGGTGCACAT | DTYLEISFTGGT |
| | GTTCAGATACAAGGTAGATTTGCAAAGAATGACTGGAG | LEPGAHVQIQGR |
| | TAACTATACACAGTCAAATGACTACTCATTCAAGTCTG | FAKNDWSNYTQS |
| | CTTCACAGTTTGTTGAATGGGATCAGGTAACAGCATAC | NDYSFKSASQFV |
| | TTGAACGGTGTTCTTGTATGGGGTAAAGAACCCGGTGG | EWDQVTAYLNGV |
| | CAGTGTAGTAGGTTCAGGTTCAGGATCCGAAAATCTGT | LVWGKEPGGSVV |
| | ATTTTCAGGGTGGGTCTCCAGGTAGCCCGGCTGGCTCT | GSGSGSENLYFQ |
| | CCTACCTCTACTGAGGAAGGTACTTCTGAAAGCGCTAC | GGSPGSPAGSPT |
| | TCCTGAGTCTGGTCCAGGTACCTCTACTGAACCGTCCG | STEEGTSESATP |
| | AAGGTAGCGCTCCAGGTAGCCCAGCAGGCTCTCCGACT | ESGPGTSTEPSE |
| | TCCACTGAGGAAGGTACTTCTACTGAACCTTCCGAAGG | GSAPGSPAGSPT |
| | CAGCGCACCAGGTACCTCTACTGAACCTTCTGAGGGCA | STEEGTSTEPSE |
| | GCGCTCCAGGTACTTCTGAAAGCGCTACCCCGGAATCT | GSAPGTSTEPSE |
| | GGCCCAGGTAGCGAACCGGCTACTTCTGGTTCTGAAAC | GSAPGTSESATP |
| | CCCAGGTAGCGAACCGGCTACCTCCGGTTCTGAAACTC | ESGPGSEPATSG |
| | CAGGTAGCCCGGCAGGCTCTCCGACCTCTACTGAGGAA | SETPGSEPATSG |
| | GGTACTTCTGAAAGCGCAACCCCGGAGTCCGGCCCAGG | SETPGSPAGSPT |
| | TACCTCTACCGAACCGTCTGAGGGCAGCGCACCAGGTA | STEEGTSESATP |
| | CTTCTACCGAACCGTCCGAGGGTAGCGCACCAGGTAGC | ESGPGTSTEPSE |
| | CCAGCAGGTTCTCCTACCTCCACCGAGGAAGGTACTTC | GSAPGTSTEPSE |
| | TACCGAACCGTCCGAGGGTAGCGCACCAGGTACCTCTA | GSAPGSPAGSPT |
| | CTGAACCTTCTGAGGGCAGCGCTCCAGGTACTTCTGAA | STEEGTSTEPSE |
| | AGCGCTACCCCGGAGTCCGGTCCAGGTACTTCTACTGA | GSAPGTSTEPSE |
| | ACCGTCCGAAGGTAGCGCACCAGGTACTTCTGAAAGCG | GSAPGTSESATP |
| | CAACCCCTGAATCCGGTCCAGGTAGCGAACCGGCTACT | ESGPGTSTEPSE |
| | TCTGGCTCTGAGACTCCAGGTACTTCTACCGAACCGTC | GSAPGTSESATP |
| | CGAAGGTAGCGCACCAGGTACTTCTACTGAACCGTCTG | ESGPGSEPATSG |
| | AAGGTAGCGCACCAGGTACTTCTGAAAGCGCAACCCCG | SETPGTSTEPSE |
| | GAATCCGGCCCAGGTACCTCTGAAAGCGCAACCCCGGA | GSAPGTSTEPSE |
| | GTCCGGCCCAGGTAGCCCTGCTGGCTCTCCAACCTCCA | GSAPGTSESATP |
| | CCGAAGAAGGTACCTCTGAAAGCGCAACCCCTGAATCC | ESGPGTSESATP |
| | GGCCCAGGTAGCGAACCGGCAACCTCCGGTTCTGAAAC | ESGPGSPAGSPT |
| | CCCAGGTACCTCTGAAAGCGCTACTCCGGAGTCTGGCC | STEEGTSESATP |
| | CAGGTACCTCTACTGAACCGTCTGAGGGTAGCGCTCCA | ESGPGSEPATSG |
| | GGTACTTCTACTGAACCGTCCGAAGGTAGCGCACCAGG | SETPGTSESATP |
| | TACTTCTACCGAACCGTCCGAAGGCAGCGCTCCAGGTA | ESGPGTSTEPSE |
| | CCTCTACTGAACCTTCCGAGGGCAGCGCTCCAGGTACC | GSAPGTSTEPSE |
| | TCTACCGAACCTTCTGAAGGTAGCGCACCAGGTACTTC | GSAPGTSTEPSE |
| | TACCGAACCGTCCGAGGGTAGCGCACCAGGTAGCCCAG | GSAPGTSTEPSE |
| | CAGGTTCTCCTACCTCCACCGAGGAAGGTACTTCTACC | GSAPGTSTEPSE |
| | GAACCGTCCGAGGGTAGCGCACCAGGTACCTCTGAAAG | GSAPGTSTEPSE |
| | CGCAACTCCTGAGTCTGGCCCAGGTAGCGAACCTGCTA | GSAPGSPAGSPT |
| | CCTCCGGCTCTGAGACTCCAGGTACCTCTGAAAGCGCA | STEEGTSTEPSE |
| | ACCCCGGAATCTGGTCCAGGTAGCGAACCTGCAACCTC | GSAPGTSESATP |
| | TGGCTCTGAAACCCCAGGTACCTCTGAAAGCGCTACTC | ESGPGSEPATSG |
| | CTGAATCTGGCCCAGGTACTTCTACTGAACCGTCCGAG | SETPGTSESATP |
| | GGCAGCGCACCAGGTACTTCTGAAAGCGCTACTCCTGA | ESGPGSEPATSG |
| | GTCCGGCCCAGGTAGCCCGGCTGGCTCTCCGACTTCCA | SETPGTSESATP |
| | CCGAGGAAGGTAGCCCGGCTGGCTCTCCAACTTCTACT | ESGPGTSTEPSE |
| | GAAGAAGGTAGCCCGGCAGGCTCTCCGACCTCTACTGA | GSAPGTSESATP |
| | GGAAGGTACTTCTGAAAGCGCAACCCCGGAGTCCGGCC | ESGPGSPAGSPT |
| | CAGGTACCTCTACCGAACCGTCTGAGGGCAGCGCACCA | STEEGSPAGSPT |
| | GGTGGTAGCCCGGCTGGCTCTTGTACCTCTCCAGGTAC | STEEGSPAGSPT |
| | CTCTGAAAGCGCAACTCCTGAGTCTGGCCCAGGTAGCG | STEEGTSESATP |
| | AACCTGCTACCTCCGGCTCTGAGACTCCAGGTACCTCT | ESGPGTSTEPSE |
| | GAAAGCGCAACCCCGGAATCTGGTCCAGGTAGCGAACC | GSAPGGSPAGSC |
| | TGCAACCTCTGGCTCTGAAACCCCAGGTACCTCTGAAA | TSPGTSESATPE |
| | GCGCTACTCCTGAATCTGGCCCAGGTACTTCTACTGAA | SGPGSEPATSGS |
| | CCGTCCGAGGGCAGCGCACCAGGTAGCCCTGCTGGCTC | ETPGTSESATPE |
| | TCCAACCTCCACCGAAGAAGGTACCTCTGAAAGCGCAA | SGPGSEPATSGS |
| | CCCCTGAATCCGGCCCAGGTAGCGAACCGGCAACCTCC | ETPGTSESATPE |
| | GGTTCTGAAACCCCAGGTACTTCTGAAAGCGCTACTCC | SGPGTSTEPSEG |
| | TGAGTCCGGCCCAGGTAGCCCGGCTGGCTCTCCGACTT | SAPGSPAGSPTS |
| | CCACCGAGGAAGGTAGCCCGGCTGGCTCTCCAACTTCT | TEEGTSESATPE |
| | ACTGAAGAAGGTACTTCTACCGAACCTTCCGAGGGCAG | SGPGSEPATSGS |
| | CGCACCAGGTACTTCTGAAAGCGCTACCCCTGAGTCCG | ETPGTSESATPE |
| | GCCCAGGTACTTCTGAAAGCGCTACTCCTGAATCCGGT | SGPGSPAGSPTS |
| | CCAGGTACTTCTGAAAGCGCTACCCCGGAATCTGGCCC | TEEGSPAGSPTS |
| | AGGTAGCGAACCGGCTACTTCTGGTTCTGAAACCCCAG | TEEGTSTEPSEG |
| | GTAGCGAACCGGCTACCTCCGGTTCTGAAACTCCAGGT | SAPGTSESATPE |
| | AGCCCAGCAGGCTCTCCGACTTCCACTGAGGAAGGTAC | SGPGTSESATPE |
| | TTCTACTGAACCTTCCGAAGGCAGCGCACCAGGTACCT | SGPGTSESATPE |
| | CTACTGAACCTTCTGAGGGCAGCGCTCCAGGTAGCGAA | SGPGSEPATSGS |
| | CCTGCAACCTCTGGCTCTGAAACCCCAGGTACCTCTGA | ETPGSEPATSGS |
| | AAGCGCTACTCCTGAATCTGGCCCAGGTACTTCTACTG | ETPGSPAGSPTS |
| | AACCGTCCGAGGGCAGCGCACCAGGTTAA (SEQ ID | TEEGTSTEPSEG |
| | NO: 971) | SAPGTSTEPSEG |
| | | SAPGSEPATSGS |
| | | ETPGTSESATPE |
| | | SGPGTSTEPSEG |
| | | SAPG(SEQ ID |
| | | NO: 972) |

### Example 8: Construction of Cys3-XTEN

[0452] A pair of primers was designed to introduce the restriction site BamHI and cysteine island 1 of sequence GRATAEAAGCGTAEAA (SEQ ID NO: 973) at the N-terminus of XTEN_AE432-1, and a partial cysteine island 2 of sequence TAEAAG (SEQ ID NO: 974) and restriction site BbsI at C-terminus of XTEN_AE432-1. A second pair of primers was designed to introduce the restriction site BsaI and a partial cysteine island 2 of sequence GCGTAEAA (SEQ ID NO: 975) at the N-terminus of XTEN_AE432-2, and cysteine island 4 of sequence TAEAAGCGTAEAAR (SEQ ID NO: 976) with an 8×His-tag (H8) (SEQ ID NO: 20) and restriction site HindIII at the C-terminus of XTEN_AE432-2. The XTEN_AE432-1 contains the 1-432 amino acid sequence and XTEN_AE432-2 contains the 433-864 amino acid sequence encoded by the XTEN_AE864 gene. These two pairs of primers were used to amplify the XTEN_AE432-1 and XTEN_AE432-2 gene, respectively, by polymerase chain reaction (PCR). The PCR products of correct sizes were gel-purified and digested with the restriction enzymes BamHI/BbsI and BsaI/HindIII, respectively, as the inserts for ligation. A destination vector, a derivative of pET30 (Novagen) includes a CBD (cellulose binding domain)-stuffer with the flanking restriction sites BamHI and HindIII. The destination vector was digested with the restriction enzymes BamHI/HindIII to remove the stuffer and prepared as the vector. The vector was ligated with the BamHI/BbsI digested PCR product of XTEN_AE432-1 and BsaI/HindIII digested PCR of XTEN_AE432-2 above. The ligation mixture was transformed into E. coli TOP10 competent cells. Transformants were screened by DNA miniprep and the desired constructs were confirmed by DNA sequencing. Thus, the final plasmid yields the CBD-cysteine island 1-XTEN_AE432-cysteine island 2-XTEN_AE432-cysteine island 3-H8 (“H8” disclosed as SEQ ID NO: 20) gene under the control of a T7 promoter. The DNA sequences and protein sequences are provided in Table 27.

TABLE 27
Cys3-XTEN DNA and amino acid sequences

| Clone | | Amino Acid |
|---|---|---|
| Name | DNA Sequence | Sequence |
| CBD-Cys1- | ATGGCTAATACCCCAGTGAGCGGCAACCTGAAAGTG | MANTPVSGNLKVEFY |
| AE432- | GAATTCTACAATAGCAACCCGAGCGACACCACCAAC | NSNPSDTTNSINPQF |
| Cys2- | AGCATTAATCCGCAGTTCAAAGTGACCAACACGGGT | KVTNTGSSAIDLSKL |
| AE432- | AGCTCCGCGATCGATCTGTCGAAGCTGACGCTGCGT | TLRYYYTVDGQKDQT |
| Cys3-H8 | TACTATTACACGGTTGACGGTCAGAAAGATCAGACG | FWADHAAIIGSNGSY |
| (AC673) | TTCTGGGCTGACCATGCGGCCATTATTGGCAGCAAC | NGITSNVKGTFVKMS |
| (“H8” | GGTTCCTACAACGGTATCACGAGCAATGTCAAAGGC | SSTNNADTYLEISFT |
| disclosed | ACTTTTGTTAAGATGAGCTCTTCGACCAACAATGCC | GGTLEPGAHVQIQGR |
| as SEQ ID | GATACCTATCTGGAGATTAGCTTCACCGGTGGTACT | FAKNDWSNYTQSNDY |
| NO: 20) | CTGGAGCCGGGTGCACACGTTCAAATCCAAGGTCGC | SFKSASQFVEWDQVT |
| | TTCGCAAAGAATGACTGGAGCAACTATACCCAGTCC | AYLNGVLVWGKEPGG |
| | AATGACTACAGCTTCAAAAGCGCTAGCCAATTTGTT | SVVGSGSGSGRATAE |
| | GAATGGGATCAGGTCACCGCATACCTGAACGGCGTG | AAGCGTAEAAGSPAG |
| | CTGGTCTGGGGCAAGGAACCGGGTGGTAGCGTTGTC | SPTSTEEGTSESATP |
| | GGTTCTGGCAGCGGATCCggtcgtGCGACGGCAGAA | ESGPGTSTEPSEGSA |
| | GCCGCTGGCtgcGGTACTGCTGAAGCGGCAGGTAGC | PGSPAGSPTSTEEGT |
| | CCAGCTGGTAGCCCAACCTCTACCGAAGAAGGTACC | STEPSEGSAPGTSTE |
| | TCTGAATCCGCTACTCCAGAATCCGGTCCTGGTACT | PSEGSAPGTSESATP |
| | AGCACTGAGCCAAGCGAAGGTTCTGCTCCAGGCTCC | ESGPGSEPATSGSET |
| | CCGGCAGGTAGCCCTACCTCTACCGAAGAGGGCACT | PGSEPATSGSETPGS |
| | AGCACCGAACCATCTGAGGGTTCCGCTCCTGGCACC | PAGSPTSTEEGTSES |
| | TCCACTGAACCGTCCGAAGGCAGTGCTCCGGGTACT | ATPESGPGTSTEPSE |
| | TCCGAAAGCGCAACTCCGGAATCCGGCCCTGGTTCT | GSAPGTSTEPSEGSA |
| | GAGCCTGCTACTTCCGGCTCTGAAACTCCAGGTAGC | PGSPAGSPTSTEEGT |
| | GAGCCAGCGACTTCTGGTTCTGAAACTCCAGGTTCA | STEPSEGSAPGTSTE |
| | CCGGCGGGTAGCCCGACGAGCACGGAGGAAGGTACC | PSEGSAPGTSESATP |
| | TCTGAGTCGGCCACTCCTGAGTCCGGTCCGGGCACG | ESGPGTSTEPSEGSA |
| | AGCACCGAGCCGAGCGAGGGTTCAGCCCCGGGTACC | PGTSESATPESGPGS |
| | AGCACGGAGCCGTCCGAGGGTAGCGCACCGGGTTCT | EPATSGSETPGTSTE |
| | CCGGCGGGCTCCCCTACGTCTACGGAAGAGGGTACG | PSEGSAPGTSTEPSE |
| | TCCACTGAACCTAGCGAGGGCAGCGCGCCAGGCACC | GSAPGTSESATPESG |
| | AGCACTGAACCGAGCGAAGGCAGCGCACCTGGCACT | PGTSESATPESGPGS |
| | AGCGAGTCTGCGACTCCGGAGAGCGGTCCGGGTACG | PAGSPTSTEEGTSES |
| | AGCACGGAACCAAGCGAAGGCAGCGCCCCAGGTACC | ATPESGPGSEPATSG |
| | TCTGAATCTGCTACCCCAGAATCTGGCCCGGGTTCC | SETPGTSESATPESG |
| | GAGCCAGCTACCTCTGGTTCTGAAACCCCAGGTACT | PGTSTEPSEGSAPGT |
| | TCCACTGAACCAAGCGAAGGTAGCGCTCCTGGCACT | STEPSEGSAPGTSTE |
| | TCTACTGAACCATCCGAAGGTTCCGCTCCTGGTACG | PSEGSAPGTSTEPSE |
| | TCTGAAAGCGCTACCCCTGAAAGCGGCCCAGGCACC | GSAPGTSTEPSEGSA |
| | TCTGAAAGCGCTACTCCTGAGAGCGGTCCAGGCTCT | PGTSTEPSEGSAPGS |
| | CCAGCAGGTTCTCCAACCTCCACTGAAGAAGGCACC | PAGSPTSTEEGTSTE |
| | TCTGAGTCTGCTACCCCTGAATCTGGTCCTGGCTCC | PSEGSAPTAEAAGCG |
| | GAACCTGCTACCTCTGGTTCCGAAACTCCAGGTACC | TAEAAGTSESATPES |
| | TCGGAATCTGCGACTCCGGAATCTGGCCCGGGCACG | GPGSEPATSGSETPG |
| | AGCACGGAGCCGTCTGAGGGTAGCGCACCAGGTACC | TSESATPESGPGSEP |
| | AGCACTGAGCCTTCTGAGGGCTCTGCACCGGGTACC | ATSGSETPGTSESAT |
| | TCCACGGAACCTTCGGAAGGTTCTGCGCCGGGTACC | PESGPGTSTEPSEGS |
| | TCCACTGAGCCATCCGAGGGTTCAGCACCAGGTACT | APGTSESATPESGPG |
| | AGCACGGAACCGTCCGAGGGCTCTGCACCAGGTACG | SPAGSPTSTEEGSPA |
| | AGCACCGAACCGTCGGAGGGTAGCGCTCCAGGTAGC | GSPTSTEEGSPAGSP |
| | CCAGCGGGCTCTCCGACAAGCACCGAAGAAGGCACC | TSTEEGTSESATPES |
| | AGCACCGAGCCGTCCGAAGGTTCCGCACCAACCGCT | GPGTSTEPSEGSAPG |
| | GAAGCCGCAGGTtgtGGCACTGCGGAAGCTGCAGGT | TSESATPESGPGSEP |
| | ACAAGCGAGAGCGCGACTCCTGAATCTGGTCCGGGT | ATSGSETPGTSESAT |
| | AGCGAGCCTGCAACCAGCGGTTCTGAGACGCCGGGC | PESGPGSEPATSGSE |
| | ACTTCCGAATCTGCGACCCCGGAGTCCGGTCCAGGT | TPGTSESATPESGPG |
| | TCAGAGCCGGCGACGAGCGGTTCGGAAACGCCGGGT | TSTEPSEGSAPGSPA |
| | ACGTCTGAATCAGCCACGCCGGAGTCTGGTCCGGGT | GSPTSTEEGTSESAT |
| | ACCTCGACCGAACCAAGCGAAGGTTCGGCACCGGGT | PESGPGSEPATSGSE |
| | ACTAGCGAGAGCGCAACCCCTGAAAGCGGTCCGGGC | TPGTSESATPESGPG |
| | AGCCCGGCAGGTTCTCCAACCAGCACCGAAGAAGGT | SPAGSPTSTEEGSPA |
| | TCCCCTGCTGGTAGCCCGACCTCTACGGAGGAAGGT | GSPTSTEEGTSTEPS |
| | AGCCCTGCAGGTTCCCCAACTTCTACTGAGGAAGGT | EGSAPGTSESATPES |
| | ACTTCTGAGTCCGCTACCCCAGAAAGCGGTCCTGGT | GPGTSESATPESGPG |
| | ACCTCCACTGAACCGTCTGAAGGCTCTGCACCAGGC | TSESATPESGPGSEP |
| | ACTTCTGAGTCTGCTACTCCAGAAAGCGGCCCAGGT | ATSGSETPGSEPATS |
| | TCTGAACCAGCAACTTCTGGCTCTGAGACTCCAGGC | GSETPGSPAGSPTST |
| | ACTTCTGAGTCCGCAACGCCTGAATCCGGTCCTGGT | EEGTSTEPSEGSAPG |
| | TCTGAACCAGCTACTTCCGGCAGCGAAACCCCAGGT | TSTEPSEGSAPGSEP |
| | ACCTCTGAGTCTGCGACTCCAGAGTCTGGTCCTGGT | ATSGSETPGTSESAT |
| | ACTTCCACTGAGCCTAGCGAGGGTTCCGCACCAGGT | PESGPGTSTEPSEGS |
| | TCTCCGGCTGGTAGCCCGACCAGCACGGAGGAGGGT | APTAEAAGCGTAEAA |
| | ACGTCTGAATCTGCAACGCCGGAATCGGGCCCAGGT | RHHHHHHHH (SEQ |
| | TCGGAGCCTGCAACGTCTGGCAGCGAAACCCCGGGT | ID NO: 978) |
| | ACCTCCGAATCTGCTACACCGGAAAGCGGTCCTGGC | |
| | AGCCCTGCTGGTTCTCCAACCTCTACCGAGGAGGGT | |
| | TCACCGGCAGGTAGCCCGACTAGCACTGAAGAAGGT | |
| | ACTAGCACGGAGCCGAGCGAGGGTAGTGCTCCGGGT | |
| | ACGAGCGAGAGCGCAACGCCAGAGAGCGGTCCAGGC | |
| | ACCAGCGAATCGGCCACCCCTGAGAGCGGCCCAGGT | |
| | ACTTCTGAGAGCGCCACTCCTGAATCCGGCCCTGGT | |
| | AGCGAGCCGGCAACCTCCGGCTCAGAAACTCCTGGT | |
| | TCGGAACCAGCGACCAGCGGTTCTGAAACTCCGGGT | |
| | AGCCCGGCAGGCAGCCCAACGAGCACCGAAGAGGGT | |
| | ACCAGCACGGAACCGAGCGAGGGTTCTGCCCCGGGT | |
| | ACTTCCACCGAACCATCGGAGGGCTCTGCACCTGGT | |
| | AGCGAACCTGCGACGTCTGGTTCTGAAACGCCGGGT | |
| | ACCAGCGAAAGCGCTACCCCAGAATCCGGTCCGGGC | |
| | ACTAGCACCGAGCCATCGGAGGGCTCCGCACCAACT | |
| | GCAGAAGCGGCTGGTtgtGGCACCGCCGAAGCAGCT | |
| | cgtCATCACCATCACCACCATCATCACTAA (SEQ | |
| | ID NO: 977) | |

### Example 9: Construction of Lys2-XTEN

[0453] A pair of primers was designed to introduce the restriction site BamHI and the amino acid sequence GRGSP (SEQ ID NO: 979) at the N-terminus of XTEN_AE432-1, and the amino acid sequence TAEAAG (SEQ ID NO: 974) and restriction site BbsI at the C-terminus of XTEN_AE432-1. A second pair of primers was designed to introduce the restriction site BsaI and an amino acid sequence with an incorporated lysine of GKPGTAEAA (SEQ ID NO: 980) at the N-terminus of XTEN_AE432-2, and an amino acid sequence with an incorporated lysine of GKAT (SEQ ID NO: 981) with an 8×His-tag (H8) (SEQ ID NO: 20) and restriction site HindIII at C-terminus of XTEN_AE432-2. XTEN_AE432-1 contains the 1-432 amino acid sequence and XTEN_AE432-2 contains the 433-864 amino acid sequence encoded by the XTEN_AE864 gene. These two pairs of primers were used to amplify the XTEN_AE432-1 and XTEN_AE432-2 gene, respectively, by polymerase chain reaction (PCR). The PCR products of right sizes were gel-purified and digested with the restriction enzymes BamHI/BbsI and BsaI/HindIII, respectively, as the inserts for ligation. A destination vector, derivative of pET30 (Novagen), of CBD (cellulose binding domain)-stuffer with the flanking restriction sites BamHI and HindIII was digested with the restriction enzymes BamHI/HindIII to remove the stuffer and prepared as the vector. Ligate the vector with the BamHI/BbsI digested PCR product of XTEN_AE432-1 and BsaI/HindIII digested PCR of XTEN_AE432-2 above. The ligation mixture was transformed into E. coli TOP10 competent cells. Transformants were screened by DNA miniprep and the desired constructs were confirmed by DNA sequencing. Thus, the final plasmid yields the CBD-GRGSP (SEQ ID NO: 979)-XTEN_AE432-TAEAAGKPGTAEAA (SEQ ID NO: 982)-XTEN_AE432-GKAT-H8 (SEQ ID NO: 20) gene under the control of a T7 promoter. The DNA sequences and protein sequences are provided in Table 28.

TABLE 28
Lvs2-XTEN DNA and amino acid sequences

| Clone | | Amino Acid |
|---|---|---|
| Name | DNA Sequence | Sequence |
| CBD-R- | ATGGCTAATACCCCAGTGAGCGGCAACCTGAAAGT | MANTPVSGNLKVEFY |
| AE432-K- | GGAATTCTACAATAGCAACCCGAGCGACACCACCA | NSNPSDTTNSINPQF |
| AE432-K- | ACAGCATTAATCCGCAGTTCAAAGTGACCAACACG | KVTNTGSSAIDLSKL |
| H8 | GGTAGCTCCGCGATCGATCTGTCGAAGCTGACGCT | TLRYYYTVDGQKDQT |
| (AC698) | GCGTTACTATTACACGGTTGACGGTCAGAAAGATC | FWADHAAIIGSNGSY |
| (“H8” | AGACGTTCTGGGCTGACCATGCGGCCATTATTGGC | NGITSNVKGTFVKMS |
| disclosed | AGCAACGGTTCCTACAACGGTATCACGAGCAATGT | SSTNNADTYLEISFT |
| as SEQ ID | CAAAGGCACTTTTGTTAAGATGAGCTCTTCGACCA | GGTLEPGAHVQIQGR |
| NO: 20) | ACAATGCCGATACCTATCTGGAGATTAGCTTCACC | FAKNDWSNYTQSNDY |
| | GGTGGTACTCTGGAGCCGGGTGCACACGTTCAAAT | SFKSASQFVEWDQVT |
| | CCAAGGTCGCTTCGCAAAGAATGACTGGAGCAACT | AYLNGVLVWGKEPGG |
| | ATACCCAGTCCAATGACTACAGCTTCAAAAGCGCT | SVVGSGSGSGRGSPG |
| | AGCCAATTTGTTGAATGGGATCAGGTCACCGCATA | SPAGSPTSTEEGTSE |
| | CCTGAACGGCGTGCTGGTCTGGGGCAAGGAACCGG | SATPESGPGTSTEPS |
| | GTGGTAGCGTTGTCGGTTCTGGCAGCGGATCCggt | EGSAPGSPAGSPTST |
| | cgtGGGTCTCCAGGTAGCCCAGCTGGTAGCCCAAC | EEGTSTEPSEGSAPG |
| | CTCTACCGAAGAAGGTACCTCTGAATCCGCTACTC | TSTEPSEGSAPGTSE |
| | CAGAATCCGGTCCTGGTACTAGCACTGAGCCAAGC | SATPESGPGSEPATS |
| | GAAGGTTCTGCTCCAGGCTCCCCGGCAGGTAGCCC | GSETPGSEPATSGSE |
| | TACCTCTACCGAAGAGGGCACTAGCACCGAACCAT | TPGSPAGSPTSTEEG |
| | CTGAGGGTTCCGCTCCTGGCACCTCCACTGAACCG | TSESATPESGPGTST |
| | TCCGAAGGCAGTGCTCCGGGTACTTCCGAAAGCGC | EPSEGSAPGTSTEPS |
| | AACTCCGGAATCCGGCCCTGGTTCTGAGCCTGCTA | EGSAPGSPAGSPTST |
| | CTTCCGGCTCTGAAACTCCAGGTAGCGAGCCAGCG | EEGTSTEPSEGSAPG |
| | ACTTCTGGTTCTGAAACTCCAGGTTCACCGGCGGG | TSTEPSEGSAPGTSE |
| | TAGCCCGACGAGCACGGAGGAAGGTACCTCTGAGT | SATPESGPGTSTEPS |
| | CGGCCACTCCTGAGTCCGGTCCGGGCACGAGCACC | EGSAPGTSESATPES |
| | GAGCCGAGCGAGGGTTCAGCCCCGGGTACCAGCAC | GPGSEPATSGSETPG |
| | GGAGCCGTCCGAGGGTAGCGCACCGGGTTCTCCGG | TSTEPSEGSAPGTST |
| | CGGGCTCCCCTACGTCTACGGAAGAGGGTACGTCC | EPSEGSAPGTSESAT |
| | ACTGAACCTAGCGAGGGCAGCGCGCCAGGCACCAG | PESGPGTSESATPES |
| | CACTGAACCGAGCGAAGGCAGCGCACCTGGCACTA | GPGSPAGSPTSTEEG |
| | GCGAGTCTGCGACTCCGGAGAGCGGTCCGGGTACG | TSESATPESGPGSEP |
| | AGCACGGAACCAAGCGAAGGCAGCGCCCCAGGTAC | ATSGSETPGTSESAT |
| | CTCTGAATCTGCTACCCCAGAATCTGGCCCGGGTT | PESGPGTSTEPSEGS |
| | CCGAGCCAGCTACCTCTGGTTCTGAAACCCCAGGT | APGTSTEPSEGSAPG |
| | ACTTCCACTGAACCAAGCGAAGGTAGCGCTCCTGG | TSTEPSEGSAPGTST |
| | CACTTCTACTGAACCATCCGAAGGTTCCGCTCCTG | EPSEGSAPGTSTEPS |
| | GTACGTCTGAAAGCGCTACCCCTGAAAGCGGCCCA | EGSAPGTSTEPSEGS |
| | GGCACCTCTGAAAGCGCTACTCCTGAGAGCGGTCC | APGSPAGSPTSTEEG |
| | AGGCTCTCCAGCAGGTTCTCCAACCTCCACTGAAG | TSTEPSEGSAPTAEA |
| | AAGGCACCTCTGAGTCTGCTACCCCTGAATCTGGT | AGKPGTAEAAGTSES |
| | CCTGGCTCCGAACCTGCTACCTCTGGTTCCGAAAC | ATPESGPGSEPATSG |
| | TCCAGGTACCTCGGAATCTGCGACTCCGGAATCTG | SETPGTSESATPESG |
| | GCCCGGGCACGAGCACGGAGCCGTCTGAGGGTAGC | PGSEPATSGSETPGT |
| | GCACCAGGTACCAGCACTGAGCCTTCTGAGGGCTC | SESATPESGPGTSTE |
| | TGCACCGGGTACCTCCACGGAACCTTCGGAAGGTT | PSEGSAPGTSESATP |
| | CTGCGCCGGGTACCTCCACTGAGCCATCCGAGGGT | ESGPGSPAGSPTSTE |
| | TCAGCACCAGGTACTAGCACGGAACCGTCCGAGGG | EGSPAGSPTSTEEGS |
| | CTCTGCACCAGGTACGAGCACCGAACCGTCGGAGG | PAGSPTSTEEGTSES |
| | GTAGCGCTCCAGGTAGCCCAGCGGGCTCTCCGACA | ATPESGPGTSTEPSE |
| | AGCACCGAAGAAGGCACCAGCACCGAGCCGTCCGA | GSAPGTSESATPESG |
| | AGGTTCCGCACCAACCGCTGAAGCCGCAGGTaaac | PGSEPATSGSETPGT |
| | cgGGCACTGCGGAAGCTGCAGGTACAAGCGAGAGC | SESATPESGPGSEPA |
| | GCGACTCCTGAATCTGGTCCGGGTAGCGAGCCTGC | TSGSETPGTSESATP |
| | AACCAGCGGTTCTGAGACGCCGGGCACTTCCGAAT | ESGPGTSTEPSEGSA |
| | CTGCGACCCCGGAGTCCGGTCCAGGTTCAGAGCCG | PGSPAGSPTSTEEGT |
| | GCGACGAGCGGTTCGGAAACGCCGGGTACGTCTGA | SESATPESGPGSEPA |
| | ATCAGCCACGCCGGAGTCTGGTCCGGGTACCTCGA | TSGSETPGTSESATP |
| | CCGAACCAAGCGAAGGTTCGGCACCGGGTACTAGC | ESGPGSPAGSPTSTE |
| | GAGAGCGCAACCCCTGAAAGCGGTCCGGGCAGCCC | EGSPAGSPTSTEEGT |
| | GGCAGGTTCTCCAACCAGCACCGAAGAAGGTTCCC | STEPSEGSAPGTSES |
| | CTGCTGGTAGCCCGACCTCTACGGAGGAAGGTAGC | ATPESGPGTSESATP |
| | CCTGCAGGTTCCCCAACTTCTACTGAGGAAGGTAC | ESGPGTSESATPESG |
| | TTCTGAGTCCGCTACCCCAGAAAGCGGTCCTGGTA | PGSEPATSGSETPGS |
| | CCTCCACTGAACCGTCTGAAGGCTCTGCACCAGGC | EPATSGSETPGSPAG |
| | ACTTCTGAGTCTGCTACTCCAGAAAGCGGCCCAGG | SPTSTEEGTSTEPSE |
| | TTCTGAACCAGCAACTTCTGGCTCTGAGACTCCAG | GSAPGTSTEPSEGSA |
| | GCACTTCTGAGTCCGCAACGCCTGAATCCGGTCCT | PGSEPATSGSETPGT |
| | GGTTCTGAACCAGCTACTTCCGGCAGCGAAACCCC | SESATPESGPGTSTE |
| | AGGTACCTCTGAGTCTGCGACTCCAGAGTCTGGTC | PSEGSAPGKATHHHH |
| | CTGGTACTTCCACTGAGCCTAGCGAGGGTTCCGCA | HHHH (SEQ ID |
| | CCAGGTTCTCCGGCTGGTAGCCCGACCAGCACGGA | NO: 984) |
| | GGAGGGTACGTCTGAATCTGCAACGCCGGAATCGG | |
| | GCCCAGGTTCGGAGCCTGCAACGTCTGGCAGCGAA | |
| | ACCCCGGGTACCTCCGAATCTGCTACACCGGAAAG | |
| | CGGTCCTGGCAGCCCTGCTGGTTCTCCAACCTCTA | |
| | CCGAGGAGGGTTCACCGGCAGGTAGCCCGACTAGC | |
| | ACTGAAGAAGGTACTAGCACGGAGCCGAGCGAGGG | |
| | TAGTGCTCCGGGTACGAGCGAGAGCGCAACGCCAG | |
| | AGAGCGGTCCAGGCACCAGCGAATCGGCCACCCCT | |
| | GAGAGCGGCCCAGGTACTTCTGAGAGCGCCACTCC | |
| | TGAATCCGGCCCTGGTAGCGAGCCGGCAACCTCCG | |
| | GCTCAGAAACTCCTGGTTCGGAACCAGCGACCAGC | |
| | GGTTCTGAAACTCCGGGTAGCCCGGCAGGCAGCCC | |
| | AACGAGCACCGAAGAGGGTACCAGCACGGAACCGA | |
| | GCGAGGGTTCTGCCCCGGGTACTTCCACCGAACCA | |
| | TCGGAGGGCTCTGCACCTGGTAGCGAACCTGCGAC | |
| | GTCTGGTTCTGAAACGCCGGGTACCAGCGAAAGCG | |
| | CTACCCCAGAATCCGGTCCGGGCACTAGCACCGAG | |
| | CCATCGGAGGGCTCCGCACCAggtAAAgcgaccCA | |
| | TCACCATCACCACCATCATCACTAA (SEQ ID | |
| | NO: 983) | |

### Example 10. Host Strain and Promoter for Expression of XTEN for Conjugation

[0454] Plasmids pCW1054 expressing CBD-TEV site-XTEN_AE864 under the control of the TM/ac promoter, pLCW0968.003 expressing CBD-TEV site-XTEN_AE864-GFP under the control of the TM/ac promoter, and pLCW0970.030 expressing CBD-TEV site-XTEN_AE864-GFP under the control of the PhoA promoter, were transformed into both E. coli BL21 DE3 and E. coli BL21 DE3 rne-131 (Lopez, P. J., et al. (1999) Mol. Microbiol. 33, 188-199). The rne-131 mutation disrupts the 3′ endoribonucleolytic activity of RNase E (Kido, M., et al. (1996) Journal of Bacteriology, 178: 3917-3925). Starter cultures of all six transformants were prepared by picking single colonies to inoculate 2 mL of LB Broth media containing the appropriate selective antibiotic. The starter cultures were grown overnight and 0.5 mL was used to inoculate, in quadruplicate, 25 mL of 2×YT broth, for cells containing pCW1054 and pLCW0968.003, or 25 mL of PhoA induction broth (Amunix recipe 136-1) for cells containing pLCW0970.030. The cultures were shaken for 3 hours at 37° C. The temperature was then reduced to 26° C. for all of the cultures; and for cells containing pCW1054 and pLCW0968.003 protein expression was induced with IPTG at 1.0 mM final concentration. Induction of the PhoA promoter in pLCW070.030 is auto-induced upon depletion of phosphate from the culture media. The cultures were then shaken overnight at 26° C. Samples of each culture were lysed and 20 μl of each lysate were subjected to non-reducing SDS-PAGE using NUPAGE 4-12% Bis-Tris gel from Invitrogen, according to manufacturer's specifications, with Coomassie staining. The results (FIG. 43) showed that when either CBD-TEV site-XTEN_AE864-GFP or CBD-TEV site-XTEN_AE864 is expressed under the control of the T7/lac promoter the yield of the recombinant protein is significantly higher in the E. coli BL21 DE3 rne-131 compared to the E. coli BL21 DE3 cells. Cells were also measured for GFP fluorescence using a fluorescent plate reader. The results (FIG. 44) showed that expression in E. coli BL21 DE3 cells of CBD-TEV site-XTEN_AE864-GFP under the control of the PhoA promoter is nearly three times greater than the expression of CBD-TEV site-XTEN_AE864-GFP under the control of the T7/lac promoter. In the E. coli BL21 DE3 rne-131 both the T7/lac and PhoA promoters yielded similar levels of expression. Therefore, only upon inhibition of Rnase E 3′ riboendocleolytic activity does T7/lac induction yield titers similar to that obtained using PhoA induction. Likely the faster rate of T7 RNAP transcription (Studier, W., et al. (1986) Journal of Molecular Biology 189: 113-130), relative to translation results in mRNA susceptible to endonucleolytic attack, while in the case of PhoA induction where transcription is mediated by the native E. coli RNA polymerase II, the rate of transcription is closely coupled to the rate of translation protecting the mRNA from endonucleolytic attack.

### Example 11: Construction of 1× Amino-XTEN288

[0455] A pair of primers AE278BsaIfor-AACG and AE278-RH8HindIIIrev (“H8” disclosed as SEQ ID NO: 20) were used to PCR the plasmid containing XTEN_AE864_003 in order to obtain the PCR product XTEN_AE278. Gel-purification of the band of the right size was performed, followed by digestion with BsaI/HindIII as the insert of XTEN_AE278-R-H8 (“H8” disclosed as SEQ ID NO: 20). A digestion of plasmid pCW1161, which encodes the gene of N-term-RP11-R-AE432_3Cys-R-H8 (“H8” disclosed as SEQ ID NO: 20) (construct AC763), with BsaI/HindIII was performed to remove the fragment of AE432_3Cys-R-H8 (“H8” disclosed as SEQ ID NO: 20) and gel-purify the large fragment as the vector. Ligation of the vector with the insert was performed and was used to transform BL21 competent cells to obtain the construct of N-term-RP11-R-AE288-R-H8 (“H8” disclosed as SEQ ID NO: 20). The XTEN length between the two trypsin digestion sites (R, Arginine) was calculated by XT7EN_AE278 plus some flanking amino acids and equaled exactly 288 amino acids. Thus, the construct is designed to produce the precursor N-term-RP11-R-AE288-R-H8 (“8” disclosed as SEQ ID NO: 20) (sequence in Table 29, below) and generate 1× Amino-XTEN288 (Seg 178 of Table 3, with an N-terminal amino group for conjugation) after removal of the N-term-RP11 tag and C-term 8×His-tag (SEQ ID NO: 20) by trypsin digestion.

TABLE 29
DNA and amino acid sequence for 1xAmino-XTEN288

| Clone | | Amino Acid |
|---|---|---|
| Name | DNA Sequence | Sequence |
| N-term- | ATGAAAAACCCAGAGCAAGCAGAAGAACAAGCTGAAGAACAG | MKNPEQAEEQAEEQRE |
| RP11-R- | CGCGAAGAAACACGTCCGCGTCCTCGCCCACGTCCACGTCCG | ETRPRPRPRPRPRPRP |
| AE288-R- | CGTCCACGCCCTCGTCCTCGTCCGCGCCCTCGTCCGagcgcg | RPRPRPRPSASRSAGS |
| H8 (“H8” | tctcgttccgctGGGTCTCCAAcgGGCCCAGGTTCTGAACCA | PTGPGSEPATSGSETP |
| disclosed | GCAACTTCTGGCTCTGAGACTCCAGGCACTTCTGAGTCCGCA | GTSESATPESGPGSEP |
| as SEQ ID | ACGCCTGAATCCGGTCCTGGTTCTGAACCAGCTACTTCCGGC | ATSGSETPGTSESATP |
| NO: 20) | AGCGAAACCCCAGGTACCTCTGAGTCTGCGACTCCAGAGTCT | ESGPGTSTEPSEGSAP |
| | GGTCCTGGTACTTCCACTGAGCCTAGCGAGGGTTCCGCACCA | GSPAGSPTSTEEGTSE |
| | GGTTCTCCGGCTGGTAGCCCGACCAGCACGGAGGAGGGTACG | SATPESGPGSEPATSG |
| | TCTGAATCTGCAACGCCGGAATCGGGCCCAGGTTCGGAGCCT | SETPGTSESATPESGP |
| | GCAACGTCTGGCAGCGAAACCCCGGGTACCTCCGAATCTGCT | GSPAGSPTSTEEGSPA |
| | ACACCGGAAAGCGGTCCTGGCAGCCCTGCTGGTTCTCCAACC | GSPTSTEEGTSTEPSE |
| | TCTACCGAGGAGGGTTCACCGGCAGGTAGCCCGACTAGCACT | GSAPGTSESATPESGP |
| | GAAGAAGGTACTAGCACGGAGCCGAGCGAGGGTAGTGCTCCG | GTSESATPESGPGTSE |
| | GGTACGAGCGAGAGCGCAACGCCAGAGAGCGGTCCAGGCACC | SATPESGPGSEPATSG |
| | AGCGAATCGGCCACCCCTGAGAGCGGCCCAGGTACTTCTGAG | SETPGSEPATSGSETP |
| | AGCGCCACTCCTGAATCCGGCCCTGGTAGCGAGCCGGCAACC | GSPAGSPTSTEEGTST |
| | TCCGGCTCAGAAACTCCTGGTTCGGAACCAGCGACCAGCGGT | EPSEGSAPGTSTEPSE |
| | TCTGAAACTCCGGGTAGCCCGGCAGGCAGCCCAACGAGCACC | GSAPGSEPATSGSETP |
| | GAAGAGGGTACCAGCACGGAACCGAGCGAGGGTTCTGCCCCG | GTSESATPESGPGTST |
| | GGTACTTCCACCGAACCATCGGAGGGCTCTGCACCTGGTAGC | EPSEGSAPSASRSAHH |
| | GAACCTGCGACGTCTGGTTCTGAAACGCCGGGTACCAGCGAA | HHHHHH (SEQ ID |
| | AGCGCTACCCCAGAATCCGGTCCGGGCACTAGCACCGAGCCA | NO: 986) |
| | TCGGAGGGCTCCGCACCAagcgcctctcgctccgcaCATCAC | |
| | CATCACCACCATCATCACTAA (SEQ IDNO: 985) | |

### Example 12: Optimization for Expression of XTEN Constructs with RP11 Affinity Tag

### 1. 1. Design and Construction of Constructs Encoding N-Term-RP11-AE864-GFP and MalEss-AE48-RP11-AE864

[0456] A group of highly expressed native E. coli proteins described by Ishihama Y. et al, BMC Genomics 2008, 9:102 were used to generate a list of the first 20 N-terminal amino acids (column 3 of Table 30), from which the hydrophobic amino acids F, I, W, L, V, M, C were converted to alanine or serine, or were deleted in order to generate candidates to create helper sequences containing at least 11 amino acids (column 4 of Table 30). For comparative purposes, the first 20 amino acids of a known CBD sequence from a well expressed construct built at Amunix (AC616) was also included as a control.

TABLE 30
List of N-terminal helpers
designed in the study

| | | | SEQ | | SEQ |
|---|---|---|---|---|---|
| | Protein | | ID | N-term | ID |
| Plasmid | description | 1st 20aa | NO: | Helpers | NO: |
| pSD0107 | 30S ribosomal | MAENQYYGTG | 987 | MAENQYYGTG | 999 |
| | protein S9 | RRKSSAARVF | | RRKSSAAR | |
| pSD0108 | 50S ribosomal | MAVQQNKPTR | 988 | MAAQQNKPTR | 1000 |
| | protein L32 | SKRGMRRSHD | | SKRGARRSHD | |
| pSD0109 | 30S ribosomal | MANIKSAKKR | 989 | MANAKSAKKR | 1001 |
| | protein S20 | AIQSEKARKH | | AAQSEKARKH | |
| pSD0110 | GrpE protein | MSSKEQKTPE | 990 | MSSKEQKTPE | 1002 |
| | HSP-70 cofactor | GQAPEEIIMD | | GQAPEE | |
| pSD0111 | 30S ribosomal | MAKQSMKARE | 991 | MAKQSAKARE | 1003 |
| | protein S14 | VKRVALADKY | | AKRAASADKY | |
| pSD0112 | 30S ribosomal | MATVNQLVRK | 992 | MATANQAARK | 1004 |
| | protein S12 | PRARKVAKSN | | PRARKAAKSN | |
| pSD0113 | Elongation | MSKEKFERTK | 993 | MSKEKAERTK | 1005 |
| | factor Tu | PHVNVGTIGH | | PHANAGT | |
| | (EF-Tu) | | | | |
| | (P-43) | | | | |
| pSD0114 | 30S ribosomal | MSLSTEATAK | 994 | MSASTEATAK | 1006 |
| | protein S15 | IVSEFGRDAN | | AASEAGRDAN | |
| pSD0115 | Superoxide | MSYTLPSLPY | 995 | MSYTAPSAPY | 1007 |
| | dismutase | AYDALEPHFD | | AYDAAEPH | |
| | [Mn] (EC | | | | |
| | 1.15.1.1) | | | | |
| | (MnSOD) | | | | |
| pSD0116 | rraB | MANPEQLEEQ | 996 | MANPEQAEEQ | 1008 |
| | ribonuclcase | REETRLIIEE | | REETR | |
| | E inhibitor | | | | |
| | protein B | | | | |
| pSD0117 | Cellulose | MANTPVSGKL | 997 | MANTPASGNA | 1009 |
| | Binding | KVEFYNSNPS | | KAEAYNSNPS | |
| | Protein (CBD) | | | | |
| pSD0118 | CBD (from | MANTPVSGNL | 998 | MANTPVSGNL | 1010 |
| | previous | KVEFYNSNPS | | KVEFYNSNPS | |
| | construct | | | | |
| | AC616) | | | | |

[0457] DNA oligonucleotides for the 107N-F&R to 119N-F&R series and RP11F&R sequences of Table 31 were synthesized at Elim Biopharm (Hayward, CA). Solutions of each DNA pair (107N-F and 107N-R, 108N-F and 108N-R, etc) was mixed at a 1:1 molar ratio, were denatured at 95° C. for 3 min, followed by cooling to 25° C. at 0.1° C./min to allow double strand DNA annealing. The base vector LCW0970.030 (encoding CBD-AE864-GFP) was digested with NdeI/BsaI and the larger fragment was gel-purified as the vector. The vector was ligated with the annealed oligos 107-118N-F&R and PNK treated annealed RP11F&R oligos, and the ligation products were transformed into E. coli BL21 competent cells (New England Biolabs) to obtain the colonies designated pSD0107 to pSD118. The clones pSD0107-109, pSD0111-112, and pSD0114-118 were obtained and verified by DNA sequencing; clone pSD0110.001 had one mutation of frame-shift and was used as the stuffer vector.

[0458] The plasmid construct pCW1110 (encoding RP11-AE864) was digested with BsaI/NotI and the smaller band of corresponding to the nucleotides encoding AE864 was gel-purified as the insert. pCW1139 (encoding MalEss-AE48-payload-AE864) was digested by XhoI/BstXI/NotI and the larger fragment was gel-purified as the vector. The annealed product of oligos of 119-AEN-F&R was ligated with the insert and vector, and then transformed into E. coli BL21 to obtain colonies with the plasmid, designated pSD0119. The clones were sequence verified.

### 2. Construction of N-Term Helper Libraries Based on pSD0116

[0459] DNA oligonucleotide pairs of Stuffer-RP5for & Stuffer-RP5revP, RP6-SASRSAforP & RP6-SASRSArev, L2for & L2rev, L3for & L3rev, L4for & L4rev, L5for & L5rev, L6for & L6rev, L7for & L7rev, L8for & L8rev, L9for & L9rev, 10for & L10rev, L11for & L11rev, L12for & L12rev, and L13for & L13rev (Table 31) were synthesized at Elim Biopharm (Hayward, CA) and each pair was annealed as described above (Section 1) to generate double strand DNA.

[0460] Plasmid pSD0110 was digested with NdeI/BsaI and the larger fragment was gel-purified as the vector. The vector was ligated with annealed oligos of Stuffer-RP5for&revP and RP6-SASRSAforP&rev, and then transformed into E. coli BL21 to obtain the colonies with the stuffer vector plasmid pCW1146 (Stuffer-RP11-XTEN_AE864_003-GFP). The clone was sequence verified.

[0461] The NdeI/BsaI digested pSD0110 vector was ligated with L5for&rev annealed oligos to obtain colonies of LCW1160 (L5).

[0462] The stuffer vector pCW1146 was digested with NdeI/BsaI and the larger fragment was gel-purified as the vector. The vector was ligated with annealed oligos of L2-4, and L6-13 for&rev as in Table 31, and then transformed into E. coli BL21 to obtain the colonies of constructs LCW1157 (L2), LCW1158 (L3), LCW1159 (L4), LCW1163 (L6), LCW1171 (L7), LCW1172 (L8), LCW1203 (L9), LCW1204 (10), LCW1208 (L11), LCW1209 (L12), and LCW1210 (L13).

TABLE 31
List of DNA oligonucleotides

| | | SEQ |
|---|---|---|
| | | ID |
| Name | DNA Sequence | NO: |
| RP11F | CGTCCGCGTCCTCGCCCACGTCCACGTCCGCGTCCACGCCCTCGTC | 1011 |
| | CTCGTCCGCGCCCTCGTCCGagcgcgtctcgttccgctGGGTCTCC | |
| RP11R | ACCTGGAGACCCAGCGGAACGAGACGCGCTCGGACGAGGGCGCGGA | 1012 |
| | CGAGGACGAGGGCGTGGACGCGGACGTGGACGTGGGCGAGGACGCG | |
| 107N-F | TATGGCTGAAAATCAATATTATGGTACGGGGCGCCGGAAGAGTTCG | 1013 |
| | GCCGCC | |
| 107N-R | GACGGGCGGCCGAACTCTTCCGGCGCCCCGTACCATAATATTGATT | 1014 |
| | TTCAGCCA | |
| 108N-F | TATGGCAGCTCAGCAGAATAAGCCTACACGAAGTAAAAGAGGCGCG | 1015 |
| | CGCCGGTCGCACGAT | |
| 108N-R | GACGATCGTGCGACCGGCGCGCGCCTCTTTTACTTCGTGTAGGCTT | 1016 |
| | ATTCTGCTGAGCTGCCA | |
| 109N-F | TATGGCAAATGCTAAGAGTGCAAAGAAACGGGCGGCACAAAGCGAA | 1017 |
| | AAAGCTCGGAAACAT | |
| 109N-R | GACGATGTTTCCGAGCTTTTTCGCTTTGTGCCGCCCGTTTCTTTGC | 1018 |
| | ACTCTTAGCATTTGCCA | |
| 110N-F | TATGTCCAGCAAAGAACAGAAGACTCCGGAAGGTCAAGCGCCAGAG | 1019 |
| | GAG | |
| 110N-R | GACGCTCCTCTGGCGCTTGACCTTCCGGAGTCTTCTGTTCTTTGCT | 1020 |
| | GGACA | |
| 111N-F | TATGGCCAAACAAAGCGCTAAAGCCCGCGAGGCGAAACGTGCAGCC | 1021 |
| | TCTGCGGACAAATAT | |
| 111N-R | GACGATATTTGTCCGCAGAGGCTGCACGTTTCGCCTCGCGGGCTTT | 1022 |
| | AGCGCTTTGTTTGGCCA | |
| 112N-F | TATGGCTACTGCAAATCAGGCCGCCCGTAAACCTCGAGCACGAAAG | 1023 |
| | GCTGCTAAATCAAAT | |
| 112N-R | GACGATTTGATTTAGCAGCCTTTCGTGCTCGAGGTTTACGGGCGGC | 1024 |
| | CTGATTTGCAGTAGCCA | |
| 113N-F | TATGTCCAAAGAAAAAGCCGAACGGACCAAACCTCATGCTAACGCT | 1025 |
| | GGCACG | |
| 113N-R | GACGCGTGCCAGCGTTAGCATGAGGTTTGGTCCGTTCGGCTTTTTC | 1026 |
| | TTTGGACA | |
| 114N-F | TATGTCAGCGTCTACGGAGGCAACCGCAAAAGCTGCTAGTGAAGCG | 1027 |
| | GGCCGTGATGCGAAT | |
| 114N-R | GACGATTCGCATCACGGCCCGCTTCACTAGCAGCTTTTGCGGTTGC | 1028 |
| | CTCCGTAGACGCTGACA | |
| 115N-F | TATGAGCTATACTGCACCGAGCGCACCGTATGCTTATGATGCAGCC | 1029 |
| | GAACCTCAC | |
| 115N-R | GACGGTGAGGTTCGGCTGCATCATAAGCATACGGTGCGCTCGGTGC | 1030 |
| | AGTATAGCTCA | |
| 116N-F | TATGGCAAACCCCGAACAGGCTGAGGAACAGAGAGAAGAAACA | 1031 |
| 116N-R | GACGTGTTTCTTCTCTCTGTTCCTCAGCCTGTTCGGGGTTTGCCA | 1032 |
| 117N-F | TATGGCTAATACCCCTGCGAGCGGGAACGCCAAGGCGGAAGCTTAC | 1033 |
| | AACAGTAATCCAAGC | |
| 117N-R | GACGGCTTGGATTACTGTTGTAAGCTTCCGCCTTGGCGTTCCCGCT | 1034 |
| | CGCAGGGGTATTAGCCA | |
| 118N-F | TATGGCAAATACACCGGTATCAGGCAATTTGAAGGTTGAATTCTAC | 1035 |
| | AACAGCAATCCTTCA | |
| 118N-R | GACGTGAAGGATTGCTGTTGTAGAATTCAACCTTCAAATTGCCTGA | 1036 |
| | TACCGGTGTATTTGCCA | |
| 119- | TCGAGCACGGGCAGCCCA | 1037 |
| AEN-F | | |
| 119- | GACGTGGGCTGCCCGTGC | 1038 |
| AEN-R | | |
| Stuffer- | TATGggctgaGGGTCTCaCGTCCGCGTCCTCGCCCACGTCCACGTC | 1039 |
| RP5for | CGCGT | |
| Stuffer- | GGACGTGGACGTGGGCGAGGACGCGGACGtGAGACCCtcagccCA | 1040 |
| RP5revP | | |
| RP6- | CCACGCCCTCGTCCTCGTCCGCGCCCTCGTCCGagcgcgtctcgtt | 1041 |
| SASRS | ccgc | |
| AforP | | |
| RP6- | ACCTgcggaacgagacgcgctCGGACGAGGGCGCGGACGAGGACGA | 1042 |
| SASRS | GGGCGTGGACGC | |
| Arev | | |
| L2for | tATGaaaAAYCCNGARCARGCNGARGARCARMGYGARGARACa | 1043 |
| L2rev | GACGTGTYTCYTCRCKYTGYTCYTCNGCYTGYTCNGGRTTTTTCA | 1044 |
| L3for | tATGGCNAAYCCNGARCARGCNGARGARCARMGYGARGARACa | 1045 |
| L3rev | GACGTGTYTCYTCRCKYTGYTCYTCNGCYTGYTCNGGRTTNGCCA | 1046 |
| L4for | tATGaaaAAcCCVGARCARGCDGARGAaCARGCDGARGAaCAgMGY | 1047 |
| | GAaGARACa | |
| L4rev | GACGTGTYTCTTCRCKCTGTTCYTCHGCYTGTTCYTCHGCYTGYTC | 1048 |
| | BGGGTTTTTCA | |
| L5for | tATGaRaCCNCGNCCNCGNCCNCGNCCNCGNCCNCGNCCNCGNCCN | 1049 |
| | CGNCCNCGNCCNCGNCCNCGNCCNGGGTCTCC | |
| L5rev | ACCTGGAGACCCNGGNCGNGGNCGNGGNCGNGGNCGNGGNCGNGGN | 1050 |
| | CGNGGNCGNGGNCGNGGNCGNGGNCGNGGTYTCA | |
| L6for | tATGaaaAAHMNIVGARCARGCWGARGAaCARGCDGARGAaCAgMG | 1051 |
| | YGAaGARACa | |
| L6rev | GACGTGTYTCTTCRCKCTGTTCYTCHGCYTGTTCYTCWGCYTGYTC | 1052 |
| | BKKDTTTTTCA | |
| L7for | tATGAAAAAWCAMRARMARRMWRAARAAMAARMDRAARAACAGMGC | 1053 |
| | GAAGARACA | |
| L7rev | GACGTGTYTCTTCGCKCTGTTYTTYHKYTTKTTYTTYWKYYTKYTY | 1054 |
| | KTGWTTTTTCA | |
| L8for | tATGAAAAAWCAMRARMARRMWRAARAAMAAGCDGAAGAACAGMGC | 1055 |
| | GAAGARACA | |
| L8rev | GACGTGTYTCTTCGCKCTGTTCTTCHGCTIKTTYTTYWKYYTKYTY | 1056 |
| | KTGWTTTTTCA | |
| L9for | tATGAAAAANCMNIGAACAAGAARAARAAMAAGCNGAAGAACARCG | 1057 |
| | YGARGARACA | |
| L9rev | GACGTGTYTCYTCRCGYTGTTCTTCNGCTTKTTYTTYTTCTTGTTC | 1058 |
| | KKGNTTTTTCA | |
| L10for | tATGAAAAANCMMGAACAAGAARAARAAMAAGCNGAAGAAMARMRH | 1059 |
| | RARRARAMA | |
| L10rev | GACGTKTYTYYTYDYKYTKTTCTTCNGCTTKTTYTTYTTCTTGTTC | 1060 |
| | KKGNTTTTTCA | |
| L11for | tATGAAAAAACAAGAACAAGAAAAAGAACAAGCGGAAGAACAAKCN | 1061 |
| | VARKCNVARCGTGAGGAGACA | |
| L11rev | GACGTGTCTCCTCACGYTBNGMYTBNGMTTGTTCTTCCGCTTGTTC | 1062 |
| | TTTTTCTTGTTCTTGTTTTTTCA | |
| L12for | tATGAAAAAACAAGAACAAGAAAAAGAACAAGCGGAAGAACAAKCV | 1063 |
| | VAAKCVVAAKCVVAAKCVVAACGTGAGGAGACA | |
| L12rev | GACGTGTCTCCTCACGTTBBGMTTBBGMTTBBGMTTBBGMTTGTTC | 1064 |
| | TTCCGCTTGTTCTTTTTCTTGTTCTTGTTTTTTCA | |
| L13for | tATGAAAAAACAAGAACAAGAAAAAGAACAAGCGGAAGAACAANNN | 1065 |
| | NNNNNNNNNCGTGAGGAGACA | |
| L13rev | GACGTGTCTCCTCACGNNNNNNNNNNNNTTGTTCTTCCGCTTGTTC | 1066 |
| | TTTTTCTTGTTCTTGTTTTTTCA | |

### 3. Screening and Analysis of the N-Terminal Helper Libraries LCW1157-1159

[0463] E. coli hosts transformed with the plasmids pSD0107 to pSD0118 were expressed in shake flasks and the expression levels in each were evaluated by measuring the fluorescence from the C-terminal GFP reporter. Briefly, an overnight culture was grown for each construct in SB media (with 12.5 μg/ml tetracycline), which was then used to inoculate a 200 ml culture of PhoA phosphate depletion autoinduction media with 12.5 μg/ml tetracycline (3 shake flasks were grown for each construct). After growing at 26° C. with 225 rpm for 48 h, 100 μl aliquot was taken from each culture and the GFP expression level was measured with a fluorescence plate reader with excitation wavelength of 395 nm and emission wavelength of 510 nm. Two readings were taken for each shake flask. Among the constructs tested, pSD0116 had the highest fluorescence signal, followed by pSD0114 (FIG. 81), but the expression levels of these two constructs were significantly lower than the LCW0970.030 (pLCW970) positive control.

[0464] In order to further improve expression, three libraries (LCW1157, 1158, and 1159) were built based on pSD0106, and were screened in a high through-put format. Large numbers of colonies from these libraries (Table 32) were picked to grow individually in 500 μl SB media (with 12.5 μg/ml tetracycline) in 96 deep well plates overnight at 37° C. shaking with 300 rpm. 20 μl of the saturated culture was used to inoculate 500 μl of PhoA phosphate depletion autoinduction media (with 12.5 μg/ml tetracycline) in 96 deep well plates that were incubated at 26° C. shaking with 300 rpm for 22-24 h. Expression was then determined by placing 100 μl of the culture into a 96 well plate measuring the fluorescence from the C-terminal GFP reporter.

TABLE 32
Libraries LCW1157-1159

| | | N-terminal helper | | Number |
|---|---|---|---|---|
| Library | Description | (sequence DNA) | Diversity | Screened |
| LCW | Codon optimize helper | ATGaaaAAY(C/T)CCN(A/G/ | 98304 | 406 |
| 1157 | sequence, Change 2^{nd} | C/T)GAR(A/G)CAR(A/G)GCN | | |
| | codon to Lys (AAA) | (A/C/T/G)GAR(A/G)GAR(A/ | | |
| | | G)CAR(A/G)M(A/C)GY(C/T) | | |
| | | GAR(A/G)GAR(A/G)ACa | | |
| | | (SEQ ID NO: 1067) | | |
| LCW | Codon optimize helper | ATGGCN(A/G/C/T)AAY(C/T) | 393216 | 85 |
| 1158 | sequence | CCN(A/G/C/T)GAR(A/G)CAR | | |
| | | (A/G)GCN(A/G/C/T)GAR(A/ | | |
| | | G)GAR(A/G)CAR(A/G)M(A/C) | | |
| | | GY(C/T)GAR(A/G)GAR(A/G) | | |
| | | ACa (SEQ ID NO: 1068) | | |
| LCW | Insert AEEQ (SEQ ID | ATGaaaAAcCCV(A/G/C)GAR | 20736 | 146 |
| 1159 | NO: 1070) into helper | (A/G)CAR(A/G)GCD(A/G/T) | | |
| | sequence, Use fewer | GAR(A/G)GAaCAR(A/G)GCD | | |
| | codons than LCW1157 | (A/G/T)GAR(A/G)GAaCAgM | | |
| | to keep diversity | (A/C)GY(C/T)GAaGAR(A/G) | | |
| | manageable | ACa (SEQ ID NO: 1069) | | |

[0465] After evaluation of the fluorescence signal, the six highest expression clones and two low expression clones were chosen from each 96 deep well plate tested and the expression of these clones were tested again with 4 replicates. For all three libraries, clones having higher expression than the pSD0116 construct were identified (FIGS. 82A-C), and the correlation between the original tests and retests was good (FIGS. 82D-F). Among the 3 libraries tested, library LCW1159 gave higher expression level in general, and the highest expression construct from this round of screening (LCW1159.004) came from this library.

[0466] The 8 constructs with the highest expression levels from these three libraries and controls were treated with Pop Culture (EMD Millipore), were heat treated, and the resulting lysates were analyzed with SDS-PAGE/Coomassie staining (FIG. 83). Expression levels of the 8 constructs were confirmed to be higher than controls (negative control, LSD0114 and LSD0116), and full-length proteins were produced from these constructs. Lysates of 4 top expression constructs (after Pop Culture and heat treatment) and a negative control (AP32, a purified XTEN-GFP protein without RP11 tag) were each loaded onto a MacroCap SP column at pH of 8 and conductivity of 6.5 mS/cm. The column was washed with 20 mM sodium phosphate, pH 8, 100 mM NaCl, and the protein was eluted with 20 mM sodium phosphate, pH 8, 500 mM NaCl. The samples of the load, flow through, wash and eluate were analyzed by SDS-PAGE gel (FIG. 84). The results demonstrated that the expression protein of the four, which came from all three libraries, can be captured by MacroCap SP; thus the binding was contributed to the presence of the RP11 tag in the protein since the negative control (not containing the RP11 tag) didn't bind to the MacroCap SP column.

[0467] The plasmids of the clones chosen for retests were minipreped and the DNA sequences of the N-terminal helpers were analyzed. Codon bias was observed at several locations (Table 33). For example, the 3rd amino acid of LCW1157, N, is encoded by AAC or AAT. Most of the high expression clones (77%) in LCW1157 are encoded by AAT at the 3rd amino acid, while most of the low expression clones (88%) are encoded by AAC, indicating AAT is preferred over AAC at this position for high expression. Similarly, CCG is preferred at the 4th amino acid, while GCG at the 7th amino acid is accumulated in low expression clones. These trends were also observed in libraries LCW1158 and LCW1159, as well.

TABLE 33
Analysis of sequence results of high and low expression clones in libraries LCW1157-1159*

| | | LCW1157 | | | | | | | | | | | | | |
|---|---|---|---|---|---|---|---|---|---|---|---|---|---|---|---|
| | | amino acid# | | | | | | | | | | | | | |
| | | | 3 | 4 | 5 | 6 | 7 | 8 | 9 | 10 | 11 | | 12 | 13 | |
| | | 2 | N(AA+) | P(CC+) | E(GA+) | Q(CA+) | A(GC+) | E(GA+) | E(GA+) | Q(CA+) | R or S(+G+) | | E(GA+) | E(GA+) | 14 |
| codon | | K(AAA) | 3rd | 3rd | 3rd | 3rd | 3rd | 3rd | 3rd | 3rd | 1st | 3rd | 3rd | 3rd | T(AC+) |
| high | A | K(AAA) | 0% | 10% | 57% | 67% | 33% | 80% | 70% | 50% | 30% | 0% | 63% | 57% | T(ACA) |
| total: 30 | G | | 0% | 43% | 43% | 33% | 7% | 20% | 30% | 50% | 0% | 0% | 37% | 43% | |
| | C | | 23% | 23% | 0% | 0% | 13% | 0% | 0% | 0% | 70% | 67% | 0% | 0% | |
| | T | | 77% | 23% | 0% | 0% | 47% | 0% | 0% | 0% | 0% | 33% | 0% | 0% | |
| low | A | | 0% | 13% | 88% | 50% | 25% | 38% | 63% | 25% | 63% | 0% | 75% | 63% | |
| total: 8 | G | | 0% | 13% | 13% | 50% | 63% | 63% | 38% | 75% | 0% | 0% | 25% | 38% | |
| | C | | 88% | 0% | 0% | 0% | 0% | 0% | 0% | 0% | 38% | 38% | 0% | 0% | |
| | T | | 13% | 75% | 0% | 0% | 13% | 0% | 0% | 0% | 0% | 63% | 0% | 0% | |

| | | LCW1158 | | | | | | | | | | | | | |
|---|---|---|---|---|---|---|---|---|---|---|---|---|---|---|---|
| | | amino acid# | | | | | | | | | | | | | |
| | | 2 | 3 | 4 | 5 | 6 | 7 | 8 | 9 | 10 | 11 | | 12 | 13 | |
| | | A(GC+) | N(AA+) | P(CC+) | E(GA+) | Q(CA+) | A(GC+) | E(GA+) | E(GA+) | Q(CA+) | R or S(+G+) | | E(GA+) | E(GA+) | 14 |
| codon | | 3rd | 3rd | 3rd | 3rd | 3rd | 3rd | 3rd | 3rd | 3rd | 1st | 3rd | 3rd | 3rd | T(AC+) |
| high | A | 83% | 0% | 33% | 17% | 67% | 50% | 83% | 50% | 83% | 83% | 0% | 67% | 50% | T(ACA) |
| total: 6 | G | 0% | 0% | 0% | 83% | 33% | 0% | 17% | 50% | 17% | 0% | 0% | 33% | 50% | |
| | C | 0% | 33% | 33% | 0% | 0% | 33% | 0% | 0% | 0% | 17% | 100% | 0% | 0% | |
| | T | 17% | 67% | 33% | 0% | 0% | 17% | 0% | 0% | 0% | 0% | 0% | 0% | 0% | |
| low | A | 0% | 0% | 0% | 100% | 0% | 0% | 0% | 0% | 0% | 0% | 0% | 0% | 100% | |
| total: 2 | G | 100% | 0% | 100% | 0% | 100% | 100% | 100% | 100% | 100% | 0% | 0% | 100% | 0% | |
| | C | 0% | 0% | 0% | 0% | 0% | 0% | 0% | 0% | 0% | 100% | 100% | 0% | 0% | |
| | T | 0% | 100% | 0% | 0% | 0% | 0% | 0% | 0% | 0% | 0% | 0% | 0% | 0% | |

| | | LCW1159 | | | | | | | | |
|---|---|---|---|---|---|---|---|---|---|---|
| | | amino acid# | | | | | | | | |
| | | | 3 | 4 | 5 | 6 | 7 | 8 | 9 | 10 |
| | | 2 | N(AA+) | P(CC+) | E(GA+) | Q(CA+) | A(GC+) | E(GA+) | E(GA+) | Q(CA+) |
| codon | | K(AAA) | 3rd | 3rd | 3rd | 3rd | 3rd | 3rd | 3rd | 3rd |
| high | A | K(AAA) | N(AAC) | 42% | 67% | 67% | 50% | 75% | E(GAA) | 67% |
| total: 12 | G | | | 17% | 33% | 33% | 0% | 25% | | 33% |
| | C | | | 42% | 0% | 0% | 0% | 0% | | 0% |
| | T | | | 0% | 0% | 0% | 50% | 0% | | 0% |
| low | A | | | 33% | 100% | 67% | 0% | 67% | | 67% |
| total: 3 | G | | | 33% | 0% | 33% | 100% | 33% | | 33% |
| | C | | | 33% | 0% | 0% | 0% | 0% | | 0% |
| | T | | | 0% | 0% | 0% | 0% | 0% | | 0% |

| | | LCW1159 | | | | | | | | |
|---|---|---|---|---|---|---|---|---|---|---|
| | | amino acid# | | | | | | | | |
| | | 11 | 12 | 13 | 14 | 15 | | 16 | 17 | |
| | | A(GC+) | E(GA+) | E(GA+) | Q(CA+) | R or S(+G+) | | E(GA+) | E(GA+) | 18 |
| codon | | 3rd | 3rd | 3rd | 3rd | 1st | 3rd | 3rd | 3rd | T(AC+) |
| high | A | 50% | 58% | E(GAA) | Q(CAG) | 25% | 0% | E(GAA) | 58% | T(ACA) |
| total: 12 | G | 17% | 42% | | | 0% | 0% | | 42% | |
| | C | 0% | 0% | | | 75% | 75% | | 0% | |
| | T | 33% | 0% | | | 0% | 25% | | 0% | |
| low | A | 100% | 100% | | | 33% | 0% | | 33% | |
| total: 3 | G | 0% | 0% | | | 0% | 0% | | 67% | |
| | C | 0% | 0% | | | 67% | 67% | | 0% | |
| | T | 0% | 0% | | | 0% | 33% | | 0% | |

*The total numbers of high and low expression clones analyzed are specified for each library, and the percentages of A, G, C, or T in each of the location where the codon was varied were analyzed.

### 4. Screening and Analysis of the N-Terminal Helper Library LCW1163

[0468] Since library LCW1159 had generally higher expression than LCW1157 and LCW1158, the next library design was based on LCW1159, with the introduction of more variants in the N-terminal helper domain coding region. A total of 672 clones from this library (theoretical diversity of 552%) was screened and retested in the same way as libraries LCW1157-1159. Clones with higher expression than LCW1159.004 (the highest from the previous round of screening) were observed (FIG. 85). The top expression clone, LCW1163.029, achieved a 40% improvement from LCW1159.004, while its expression level was 27% lower than the CBD control. The sequence of the high and low expression clones were analyzed, and the preferred nucleotides for expression were identified and summarized (see Table 34). Most of the locations have shown a preference of codon A for high expression, while others have a preference for C.

TABLE 34
Analysis of sequence results of high and low expression clones in the library LCW1163*

| | | Expression (Percentage) | | | | | | | | | | | | | |
|---|---|---|---|---|---|---|---|---|---|---|---|---|---|---|---|
| nucleotide number | | #9 | #10 | #11 | #12 | #15 | #18 | #21 | #24 | #30 | #33 | #36 | #43 | #45 | #51 |
| high | A | 74 | 17 | 74 | 40 | 37 | 40 | 66 | 77 | 60 | 43 | 66 | 40 | 0 | 34 |
| expression | C | 17 | 83 | 26 | 49 | 0 | 0 | 0 | 0 | 0 | 0 | 0 | 60 | 83 | 0 |
| | T | 9 | 0 | 0 | 0 | 0 | 0 | 34 | 0 | 0 | 29 | 0 | 0 | 17 | 0 |
| | G | 0 | 0 | 0 | 11 | 63 | 60 | 0 | 23 | 40 | 29 | 34 | 0 | 0 | 66 |
| low | A | 20 | 70 | 3 | 20 | 40 | 20 | 60 | 50 | 30 | 10 | 20 | 50 | 0 | 60 |
| expression | C | 60 | 30 | 70 | 30 | 0 | 0 | 0 | 0 | 0 | 0 | 0 | 50 | 50 | 0 |
| | T | 20 | 0 | 0 | 0 | 0 | 0 | 40 | 0 | 0 | 40 | 0 | 0 | 50 | 0 |
| | G | 0 | 0 | 0 | 50 | 60 | 80 | 0 | 50 | 70 | 50 | 80 | 0 | 0 | 40 |
| preferred | | A | C | A | A/C | | | | A | A | | A | | C | |

*The percentages of A, G, C, or T in each of the location where the codon was varied were analyzed, and the identified preferred nucleotides were summarized in the bottom row

### 5. Screening and Analysis of the RP11 Library LCW1160

[0469] At the same time, 168 colonies from library LCW1160 (the library varying the coding region of RP11 tag without any N-terminal helper domain (total theoretical diversity of 8.8×10¹²) were screened and analyzed. However, this library had very low expression level in general (FIG. 86), and the one outlier with high expression was found to encode a truncated RP11 tag after performing plasmid miniprep and DNA sequencing analysis. The screening results of the library, under these experimental conditions, strongly suggest that an N-terminal helper is required to achieve high expression levels.

### 6. Screening of the N-Terminal Helper Libraries LCW1171, LCW1172, LCW1203, and LCW1204

[0470] More N-terminal libraries (LCW1171, LCW1172, LCW1203, and LCW1204) were screened and analyzed in the same way as those described above. LCW1171 and 1172 were designed similarly, while LCW1171 allowed more amino acid changes in the helper sequence than LCW1172. The screening results showed that LCW1171 in general had much lower expression level than LCW1172 (FIGS. 94A and B). LCW1203 and 1204 were designed similarly, focusing on randomizing a different region of the helper sequence compared with LCW1171 and 1172. LCW1204 allowed more amino acid changes than LCW1203, which resulted in lower expression than LCW1203 in general (FIGS. 94C and D). These results suggest that the expression level is sensitive to amino acid changes in the helper domain sequences.

### 7. Screening of the N-Terminal Helper Libraries LCW1208, LCW1209, and LCW1210

[0471] Three new N-terminal libraries (LCW1208, LCW1209, and LCW1210) were designed to investigate the effect of further elongation the N-terminal helper sequence (Table 35). LCW1208 and LCW1210 introduced 4 more residues to the helper domain, while LCW1209 introduced 8 more residues. The screening results showed a general trend that LCW1209 had highest expression, followed by LCW1208, and then LCW1210 (FIG. 95), which confirmed the beneficial effect of adding more amino acid in the helper sequence.

TABLE 35
Libraries LCW1208-1210

| Library | N-terminal Helper Sequence (amino acid) | Diversity | Number Screened |
|---|---|---|---|
| LCW1208 | MKKQEQEKEQAEEQBXBXREET (SEQ ID NO: | 2304 | 336 |
| | 1071) | | |
| | (B = A/S; X = E/K/Q) | | |
| LCW1209 | MKKQEQEKEQAEEQBXBXBXBXREET (SEQ | 104976 | 336 |
| | ID NO: 1072) | | |
| | (B = A/S; X = E/K/Q) | | |
| LCW1210 | MKKQEQEKEQAEEQZZZZREET (SEQ ID NO: | 262144 | 336 |
| | 1073) | | |
| | (Z = any amino acid) | | |

[0472] Additional residues in the helper sequences were underlined.

[0473] Three new N-terminal libraries (LCW1208, LCW1209, and LCW1210) were designed to investigate the effect of further elongation the N-terminal helper sequence (Table 36). LCW1208 and LCW1210 introduced 4 more residues to the helper domain, while LCW1209 introduced 8 more residues. The screening results showed a general trend that LCW1209 had highest expression, followed by LCW1208, and then LCW1210 (FIGS. 95A-95C), which confirmed the beneficial effect of adding more amino acids in the helper sequence for improving expression.

[0474] The 4 top constructs with the highest expression levels from the three libraries were chosen from the retest and the sequence of their N-terminal helper sequences were analyzed (Table 36). The current highest expressed construct (LCW1209.029) achieved 90% of the expression level of the CBD control by comparing the average florescence after subtracting the negative control.

TABLE 36
Constructs with the highest expression levels from Libraries LCW1208-
1210 and controls.

| | | | SEQ |
|---|---|---|---|
| | Avg. | | ID |
| Sample name | Fluorescence | Helper sequence* | NO: |
| LCW 1208.009 | 9070 | MKKQEQEKEQAEEQAESEREET | 1074 |
| LCW 1208.007 | 8870 | MKKQEQEKEQAEEQAESEREET | 1075 |
| LCW 1208.008 | 8800 | MKKQEQEKEQAEEQSQSQREET | 1076 |
| LCW 1208.010 | 8740 | MKKQEQEKEQAEEQSESEREET | 1077 |
| LCW 1209.029 | 10010 | MKKQEQEKEQAEEQAKAESEAEREET | 1078 |
| LCW 1209.015 | 9440 | MKKQEQEKEQAEEQSKSQAEAEREET | 1079 |
| LCW 1209.023 | 8980 | MKKQEQEKEQAEEQAQAQAEDEREET | 1080 |
| LCW 1209.010 | 8580 | MKKQEQEKEQAEEQSKSKAEDEREET | 1081 |
| LCW 1210.030 | 8650 | MKKQEQEKEQAEEQPEVQREET | 1082 |
| LCW 1210.032 | 8310 | MKKQEQEKEQAEEQVENPREET | 1083 |
| LCW 1210.025 | 8100 | MKKQEQEKEQAEEQELCEREET | 1084 |
| LCW 1210.009 | 8030 | MKKQEQEKEQAEEQGIDTREET | 1085 |
| CBD control | 10940 | n/a | |
| Negative control | 1630 | n/a | |

*Additional residues in the helper sequences were underlined.

[0475] In summary, the screening results, under these experimental conditions, strongly suggest that an N-terminal helper contributes in achieving high expression levels.

### Example 13: Fermentation of XTEN Using PhoA Induction—Evaluation of Expression Yields

[0476] E. coli BL21 carrying the plasmids encoding Helper_LCW1159.004-RP11-AE288-His8 (“His8” disclosed as SEQ ID NO: 20) (AC767), Helper_LCW1172.033-RP11-AE576-His8 (“His8” disclosed as SEQ ID NO: 20) (AC780), and Helper_LCW1172.033-RP11-AE864-His8 (“His8” disclosed as SEQ ID NO: 20) (AC786) were transformed into the E. coli BL21 strain. Three 10 L fermentations were run for each of the 3 strains. Glycerol stocks were used to inoculate 125 mL of LB broth media containing 10 μg/mL tetracyclin. The starter cultures were then shaken overnight at 37° C. The starter culture was used to inoculate 4 L of fermentation batch media containing −20 g ammonium sulfate, 10.4 g potassium phosphate dibasic anhydrous, 5 g sodium citrate dihydrate; 4.6 g sodium phosphate monobasic monohydrate; 106 g NZ BL4 soy peptone (Kerry Bioscience #5X00043); 54 g yeast extract (Teknova #Y9020); 3.6 L water, 0.05 mL polypropylene glycol; 5.2 mL trace elements solution (Amunix recipe 144-1); 35 mL 1M magnesium sulfate; and 4 mL Kanamycin (50 mg/mL)—in 10 L glass jacketed vessel with a B. Braun Biostat B controller. The fermentation control settings were: pH=6.9+/−0.1; dO₂=10%; dissolved oxygen cascade in stirrer only mode with a range of 125-1180 rpm; air flow of 5 liters per minute of 90% oxygen; initial temperature 37° C.; base control 13% ammonium hydroxide; and no acid control. After 6 hours of culture a 70% glycerol feed was initiated at a rate of 40 g/hr. Upon the cultures reaching an OD600 of 50+/−10 OD the culture temperature was lowered to 26° C., 54 mL of 1M magnesium sulfate was added, and a salt feed consisting of: 10 g/l ammonium sulfate, 26 g/l potassium phosphate dibasic anhydrous, 2 g/l sodium citrate dihydrate; 13 g/l sodium phosphate monobasic monohydrate; 15 g/l potassium phosphate monobasic anhydrous; 0.08% trace elements solution, was started at a rate of 33 g/L and continued for 6 hours. After a total fermentation run time of 64-70 hours the culture was harvested by centrifugation yielding cell pellets between 1.6-2.3 kilograms in wet weight. The pellets were stored frozen at −80° C. until further use. For titer analysis, end of run fermentation whole broth samples were frozen in a 0.2 mL volume, then later thawed, then 0.2 mL of water was added, then to lyse and flocculate host proteins the samples were incubated at 85° C. for 15 minutes, then transferred to 4° C. for 15 minutes, followed centrifugation for 10 minutes at 20,000 g. The resulting flocculated soluble lysates were assayed by C18 reversed phased HPLC, and the A214 absorbance area corresponding of the peaks representing the Helper-RP11-XTEN-His8 (“His8” disclosed as SEQ ID NO: 20) was compared to that of purified reference standard. Next, to determine the dry cell weight (DCW), aliquots of cells were pelleted and the supernatant discarded. The cell pellet was washed once with water, and was then dried in an oven at 80° C. for 3 days. The tubes containing cell pellets were weighed, the weight of the tube was subtracted from the measured weights, and the remaining weight was divided by the initial volume of each sample (0.0002 L) to obtain the DCW. The results of the fermentation growth, titer analysis, and dry cell weight are summarized in Table 37 below. In 96-well plate screening assays, when a library of RP11-XTEN-His8 (“His8” disclosed as SEQ ID NO: 20) constructs without an N-terminal helper, LCW1160 were screened (Example 12, FIG. 86) the expression level of the LCW1160.006, the highest expression construct, was only 50% of the expression of LCW1159.004 or LCW1172.033; constructs with helper sequences. Therefore, it is expected that XTEN constructs with N-terminal helper sequences will result in significantly higher expression titers compared to XTEN constructs not having helper sequences.

TABLE 37
Measured expression parameters

| | | | Total Run Time | Dry cell weight per Liter | Titer by culture | Average titer |
|---|---|---|---|---|---|---|
| XTEN Series | Fermentation # | Final O.D. | (hours) | of Ferm (g/L) | volume (g/L) | (micromoles/L) |
| Helper_LCW1159.004- | EC846 | 140 | 67.5 | 95 | 0.5 | 0.7 |
| RP11-AE288-His8 | EC888 | 140 | 64 | 85 | 0.8 | |
| (AC767) (“His8” | EC903 | 136 | 69 | 103 | 0.7 | |
| disclosed as | | | | | | |
| SEQ ID NO: 20) | | | | | | |
| Helper LCW1172.033- | EC850 | 125 | 66 | 107 | 1.1 | 2.0 |
| RP11-AE576-His8 | EC869 | 140 | 70 | 90 | 2.1 | |
| (AC780) (“His8” | EC883 | 170 | 67 | 102 | 2.9 | |
| disclosed as | | | | | | |
| SEQ ID NO: 20) | | | | | | |
| Helper LCW1172.033- | EC873 | 135 | 68 | 91 | 2.0 | 2.1 |
| RP11-AE864-His8 | EC889 | 145 | 65.5 | 95 | 2.3 | |
| (AC786) (“His8” | EC913 | 108 | 67 | 108 | 2.0 | |
| disclosed as | | | | | | |
| SEQ ID NO: 20) | | | | | | |

| | Titer/Dry weight ferm | | | | Std error |
|---|---|---|---|---|---|
| | (mg of XTEN/g | MW | Titer | Average titer | of the mean |
| XTEN Series | of E. coli) | (g/mol) | (micromoles/L) | (micromoles/L) | (micromoles/L) |
| Helper_LCW1159.004- | 5.6 | 26399 | 212 | 271 | 76 |
| RP11-AE288-His8 | 9.4 | 26399 | 357 | | |
| (AC767) (“His8” | 6.4 | 26399 | 243 | | |
| disclosed as | | | | | |
| SEQ ID NO: 20) | | | | | |
| Helper LCW1172.033- | 10.0 | 52929 | 189 | 388 | 182 |
| RP11-AE576-His8 | 22.8 | 52929 | 430 | | |
| (AC780) (“His8” | 28.8 | 52929 | 545 | | |
| disclosed as | | | | | |
| SEQ ID NO: 20) | | | | | |
| Helper LCW1172.033- | 22.2 | 79284 | 280 | 272 | 41 |
| RP11-AE864-His8 | 24.4 | 79284 | 308 | | |
| (AC786) (“His8” | 18.1 | 79284 | 228 | | |
| disclosed as | | | | | |
| SEQ ID NO: 20) | | | | | |

### Example 14: Purification of XTEN with RP11 and His8 Tags (“His8” Disclosed as SEQ ID NO: 20)

### 1. Expression, Lysis and Clarification

[0477] The fusion protein MKNPEQAEEQAEEQREET-RP11-SASRSA-XTEN_AE432(C12,C217,C422)-SASRSA-His(8)] (“MKNPEQAEEQAEEQREET,” “SASRSA” and “His8” disclosed as SEQ ID NOS 1086, 21 and 20, respectively), with the N-terminal helper sequence from the library member LCW1159.004 described in Example 10, with two affinity tags linked to XTEN at the N- and C-terminus, respectively, was expressed in E. coli using a 4 L fermenter using conditions described herein. After growth, the cells were harvested by centrifugation and frozen at −80° C. until use. The cell pellet was resuspended in lysis buffer (20 mM sodium phosphate, 50 mM NaCl, 2 mM EDTA pH 8.0, 3 ml buffer per gram cell paste). The cells were lysed by passing through an APV homogenizer three times at a pressure of 830-900 bar. Lysis buffer (1 ml buffer per gram cell paste) was used as a chase to retrieve hold up volume from the homogenizer. The homogenized lysate was incubated in a water bath at 85° C. for 20 minutes, followed by quick cooling in ice water bath for 20 minutes. After the heating and cooling treatment, the lysate was centrifuged at 11000 RPM for 90 minutes in a SORVALL centrifuge. After centrifugation, the supernatant was filtered through two CUNO Bio cap 25 (BC0025 L90SP08A) filters. The clarified supernatant was stored at 4° C. overnight.

### 2. Capture Step: Toyopearl IMAC Chromatography

[0478] IMAC affinity chromatography was used as a capture step for binding the XTEN with an intact C-terminal His-tag. Briefly, the chromatography column BPG140/12 (GE Life Sciences) was packed with 2000 ml Toyopearl IMAC 650 M resin (TOSOH Biosciences). The column was equilibrated with 2 column volumes (CVs) of equilibrium buffer (20 mM sodium phosphate, 500 mM NaCl, pH 8.0). Clarified cell lysate was adjusted to a final NaCl concentration of 500 mM using 5 M NaCl stock solution, and then was loaded onto the IMAC resin. The column was washed with 2 column volumes of equilibrium buffer, and then 2 column volumes of 20 mM sodium phosphate, 500 mM NaCl, 5 mM Imidazole pH 8.0, followed by 2 column volumes of 20 mM sodium phosphate, 5 mM imidazole pH 8.0 to remove salt. Elution was performed with 2 column volumes of 20 mM sodium phosphate, 100 mM imidazole, pH 8.0. The flow through, wash and elution fractions were analyzed by non-reducing 4-12% Bis-Tris SDS-PAGE/Coomassie staining and the fractions with the desired product were pooled.

### 3. Polishing/Capture Step: MacroCap SP Chromatography

[0479] Cation exchange chromatography was used as a polishing step to ensure the N-terminal integrity of the product. MacroCap SP resin (GE Life Sciences) was selected among several cation exchange media due to its superior capacity and selectivity for the product. 1000 ml of MacroCap SP resin was packed in a BPG100/13 (GE Life Sciences) chromatography column and equilibrated with 20 mM sodium phosphate pH 8.0, 20 mM NaCl. The IMAC pool was loaded onto the column and the resin was washed with 2 column volumes of 20 mM sodium phosphate, 50 mM NaCl, pH 8.0 and 2 column volumes of 20 mM sodium phosphate pH 8.0, 150 mM NaCl. The protein was eluted with 5 column volumes of linear gradient from 150 to 500 mM NaCl in 20 mM sodium phosphate pH 8.0. Fractions were collected and analyzed by 4-12% Bis-Tris SDS/PAGE. Fractions the with desired product were combined for the next step.

### 4. Trypsin Digestion of Macrocap SP Elution Pool

[0480] Trypsin (Sigma, Trypsin from Bovine Pancreas) digestion of the SP elution pool was performed at 1:200 m/m enzyme/protein ratio overnight at 37° C.

### 5. Polishing Step: Macrocap Q Chromatography

[0481] After trypsin digestion, the cleaved tags were separated from the final product using Macrocap Q chromatography. The BPG100/19 column (GE Life Sciences) was packed with 1500 ml column volume of Macrocap Q resin (GE Life Sciences). The trypsin digested Macrocap SP elution pool was incubated for 15 min at 80° C. with 20 mM DTT and 2 mM EDTA to reduce disulfide bonds and to inactivate trypsin. The cooled protein solution was diluted to a conductivity below 5 mS/cm with Milli-Q water and loaded onto the Macrocap Q column equilibrated with 20 mM HEPES, 50 mM NaCl, pH 7.0. The column was washed with 2 column volumes of 20 mM HEPES, 50 mM NaCl, pH 7.0, then 2 column volumes of 20 mM HEPES, 2 mM TCEP, 150 mM NaCl pH7.0. The protein was eluted with a linear gradient from 150 mM NaCl to 500 mM NaCl in 20 mM HEPES, pH 7.0 in 20 column volumes. Fractions were analyzed by SDS-PAGE/silver staining.

### 6. Concentration and Diafiltration (Final Formulation)

[0482] Selected MacroCap Q fractions were combined and concentrated and using 10 KD Pellicon mini (Millipore) at a feed pressure <20 psi and retentate <8 psi, followed by 10× diafiltratiion with 20 mM HEPES, 50 mM NaCl, pH 7.0 to achieve a final protein concentration of >5 mg/ml.

### 9. Purity Analysis of Proteins Purified with Different Methods

[0483] One batch (Batch 1) was purified through three purification steps as described above. Another batch (Batch 2) was purified from the same fermented material but the MacroCap SP polishing step was omitted. Truncated species of XTEN were detected by SDS-PAGE/silver staining in MacroCap Q elution fractions for Batch 2 (FIG. 87A), while the MacroCap Q elution fractions for Batch 1 were essentially free from truncations (FIG. 87B). These results support that, under the conditions employed, the MacroCap SP step based on the RP11 tag is essential to ensure N-terminal integrity and overall product quality.

### Example 15: Construction of 1× Amino, 9× Thiol-XTEN432

[0484] The following sets of primers 5Afor&CI1BbsIrev-TGGC, CI1BsaIfor-TGGC&CI2-AE38BbsIrev, and C12-AE38BsaIfor&AatIICI3-2P were used to PCR plasmid pCW1164 containing XTEN_AE432 (C422) in order to obtain the PCR products of AE-CI1, CI1-2 and CI2-3, respectively. CI1, 2&3 were designated Cysteine Island1, 2&3, having the same amino acid sequence TAEAAGCGTAEAA (SEQ ID NO: 189) but with different codon usages. Gel-purification of the PCR products was performed to obtain bands of the right sizes, which were digested with restriction enzymes SbfI/BbsI, BsaI/BbsI and BsaI/AatII, respectively, as the inserts. Digestion of the plasmid pCW1164, which encodes the gene of N-term-RP11-R-XTEN_AE432 (C422)-R-H8 (“H8” disclosed as SEQ ID NO: 20), was performed with SbfI/AatII to remove the fragment of about 290 amino acids within XTEN_AE432 and gel-purification was performed on the remaining large fragment as the vector. Ligation of the vector with the three inserts of PCR products, above, was performed and used to transform BL21 competent cells in order to obtain the construct N-term-RP11-R-XTEN_AE432 (C319, C370, C422)-R-H8 (“H8” disclosed as SEQ ID NO: 20). PCR was performed on this construct with primers CI1BsaIfor-TGGC&AatIICI3-2P to obtain a PCR product of around 360 bp in length. Gel-purification of the band of the right size was performed, followed by digestion with BsaI/AatII as the insert XTEN_AE120-3Cys, which contains three Cysteine Islands.

[0485] Simultaneously, the codon-optimized DNA fragment of XTEN_AE313-6Cys, containing six Cysteine Islands, was designed and synthesized (Genscript). The fragment was digested by the flanking restriction enzymes BsaI/BbsI and gel-purified as the insert containing the first six Cysteine Islands of XTEN_AE432. Digestion of the plasmid pCW1161, which encodes the gene of N-term-RP11-R-XTEN_AE432_3Cys-R-H8 (“H8” disclosed as SEQ ID NO: 20), with BsaI/AatII was performed to remove the fragment of XTEN_AE432_3Cys and gel-purification was performed to obtain the large fragment as the vector. Ligation of the vector with the BsaI/BbsI digested insert of XTEN_AE313-6Cys and BsaI/AatII digested insert of XTEN_AE120-3Cys, above, was performed. The ligated product was used to transform BL21 competent cells in order to obtain the construct N-term-RP11-R-XTEN_AE432 (C12, C63, C114, C165, C217, C268, C319, C370, C422)-R-H8 (“H8” disclosed as SEQ ID NO: 20). The construct was designed to produce the precursor N-term-RP11-R-AE432_9Cys-R-H8 (“H8” disclosed as SEQ ID NO: 20) (sequence in Table 38, below), the product of which was used to generate 1× Amino, 9-Thio-XTEN432 after removal of the N-term-RP11 tag and C-term 8×His-tag (SEQ ID NO: 20) by trypsin digestion. The final product contains nine cysteines in the XTEN432 sequence (Seg 177).

TABLE 38
DNA and amino acid sequence for 1xAmino, 9-Thio-XTEN432

| Clone | | Amino Acid |
|---|---|---|
| Name | DNA Sequence | Sequence |
| N-term- | ATGAAAAACCCAGAGCAAGCAGAAGAACAAGCTGAAGA | MKNPEQAEEQAE |
| RP11-R- | ACAGCGCGAAGAAACACGTCCGCGTCCTCGCCCACGTCC | E |
| AE432_ | ACGTCCGCGTCCACGCCCTCGTCCTCGTCCGCGCCCTCGT | QREETRPRPRPRP |
| 9Cys-R-H8 | CCGagcgcgtctcgttccgctGGGTCTCCAACGGCAGAGGCAGCAG | RPRPRPRPRPRPR |
| (“H8” | GTTGTGGTACAGCAGAAGCAGCTCCGGGTAGCGAGCCTG | PSASRSAGSPTAE |
| disclosed | CAACCAGCGGTTCTGAGACGCCGGGCACTTCCGAATCTG | AAGCGTAEAAPG |
| as SEQ ID | CGACCCCGGAGTCCGGTCCAGGTTCAGAGCCGGCGACGA | S |
| NO: 20) | GCGGTTCGGAAACGCCGGGTACTGCTGAAGCGGCTGGTT | EPATSGSETPGTS |
| | GTGGTACTGCTGAAGCTGCATCGACCGAACCAAGCGAAG | ESATPESGPGSEP |
| | GTTCGGCACCGGGTACTAGCGAGAGCGCAACCCCTGAAA | ATSGSETPGTAEA |
| | GCGGTCCGGGCAGCCCGGCAGGTTCTCCAACCAGCACCG | AGCGTAEAASTE |
| | AAGAAGGTTCCCCTGCTACTGCCGAAGCTGCAGGCTGCG | P |
| | GTACTGCGGAGGCGGCGTCCCCAACTTCTACTGAGGAAG | SEGSAPGTSESAT |
| | GTACTTCTGAGTCCGCTACCCCAGAAAGCGGTCCTGGTAC | PESGPGSPAGSPT |
| | CTCCACTGAACCGTCTGAAGGCTCTGCACCAGGCACTTCT | STEEGSPATAEAA |
| | GAGTCTGCTACTACCGCCGAAGCCGCTGGTTGTGGTACCG | GCGTAEAASPTS |
| | CAGAAGCTGCATCTGAGACTCCAGGCACTTCTGAGTCCG | T |
| | CAACGCCTGAATCCGGTCCTGGTTCTGAACCAGCTACTTC | EEGTSESATPESG |
| | CGGCAGCGAAACCCCAGGTACCTCTGAGTCTGCGACTCC | PGTSTEPSEGSAP |
| | AGAGTCTGGTACCGCGGAAGCGGCTGGTTGTGGTACTGC | GTSESATTAEAA |
| | AGAGGCAGCTGGTTCTCCGGCTGGTAGCCCGACCAGCAC | G |
| | GGAGGAGGGTACGTCTGAATCTGCAACGCCGGAATCGGG | CGTAEAASETPG |
| | CCCAGGTTCGGAGCCTGCAACGTCTGGCAGCGAAACCCC | T |
| | GGGTACCACGGCGGAAGCGGCAGGTTGTGGCACCGCGGA | SESATPESGPGSE |
| | GGCAGCAGCTGGTTCTCCAACCTCTACCGAGGAGGGTTC | PATSGSETPGTSE |
| | ACCGGCAGGTAGCCCGACTAGCACTGAAGAAGGTACTAG | SATPESGTAEAA |
| | CACGGAGCCGAGCGAGGGTAGTGCTCCGGGTACGAGCGA | G |
| | GAGCACGGCAGAAGCCGCTGGCtgcGGTACTGCTGAAGCG | CGTAEAAGSPAG |
| | GCAACCCCTGAGAGCGGCCCAGGTACTTCTGAGAGCGCC | S |
| | ACTCCTGAATCCGGCCCTGGTAGCGAGCCGGCAACCTCC | PTSTEEGTSESAT |
| | GGCTCAGAAACTCCTGGTTCGGAACCAGCGACCAGCGGT | PESGPGSEPATSG |
| | ACCGCTGAAGCCGCAGGTtgtGGCACTGCGGAAGCTGCAA | SETPGTTAEAAG |
| | CCGAAGAGGGTACCAGCACGGAACCGAGCGAGGGTTCTG | C |
| | CCCCGGGTACTTCCACCGAACCATCGGAGGGCTCTGCAC | GTAEAAAGSPTS |
| | CTGGTAGCGAACCTGCGACGTCTGGTTCTGAAACGCCGA | T |
| | CTGCAGAAGCGGCTGGTtgtGGCACCGCCGAAGCAGCTagcg | EEGSPAGSPTSTE |
| | cctctcgctccgcaCATCACCATCACCACCATCATCACTAA (SEQ | EGTSTEPSEGSAP |
| | ID NO: 1087) | GTSESTAEAAGC |
| | | G |
| | | TAEAATPESGPGT |
| | | SESATPESGPGSE |
| | | PATSGSETPGSEP |
| | | ATSGTAEAAGCG |
| | | T |
| | | AEAATEEGTSTEP |
| | | SEGSAPGTSTEPS |
| | | EGSAPGSEPATSG |
| | | SETPTAEAAGCG |
| | | T |
| | | AEAASASRSAHH |
| | | H |
| | | HHHHH (SEQ ID |
| | | NO: 1088) |

### Example 16: Construction of 1× Amino, 9× Thiol-XTEN864

[0486] The primers PhoAfor&RP11-SASRSABsaIrevAGGT were used to PCR the plasmid containing N-term-RP11 tag to obtain the PCR product of N-term-RP11-R. Gel-purification of the band of the right size was performed and was digested with NdeI/BsaI as the first insert. Another PCR was performed with primers AE432BsaIforAGGT&AE432_00IBbsIrev-AACG on the plasmid containing XTEN_AE864_003 in order to obtain the PCR product of XTEN_AE432. Gel purification was performed on the band of the right size, which was digested with BsaI/BbsI as the second insert. Digestion of the construct N-term-RP11-R-AE432_9Cys-R-H8 (“H8” disclosed as SEQ ID NO: 20) from Example 10 was performed with NdeI/BsaI to remove the N-term-RP11-R fragment and gel purification was performed to obtain the large fragment as the vector. Ligation of the vector with the first and second inserts, above, was performed and the product was used to transform BL21 competent cells in order to obtain the construct N-term-RP11-R-XTEN_AE864 (C444, C495, C546, C597, C649, C700, C751, C802, C854)-R-H8 (“H8” disclosed as SEQ ID NO: 20). The resulting construct was designed to produce the precursor N-term-RP11-R-AE864_9Cys-R-H8 (“H8” disclosed as SEQ ID NO: 20) (sequence in Table 39, below) the product of which would generate 1× Amino, 9-Thio-XTEN864 after removal of the N-term-RP11 tag and C-term 8×His-tag (SEQ ID NO: 20) by trypsin digestion. The resulting product contains an N-terminal amino group and nine cysteines in the XTEN864 sequence for conjugation (Seg 175).

TABLE 39
DNA and amino acid sequence for 1xAmino, 9-Thio-XTEN864

| Clone | | Amino Acid |
|---|---|---|
| Name | DNA Sequence | Sequence |
| N-term- | ATGAAAAACCCAGAGCAAGCAGAAGAACAAGCTGAAGA | MKNPEQAEEQAE |
| RP11-R- | ACAGCGCGAAGAAACACGTCCGCGTCCTCGCCCACGTCC | E |
| AE864_ | ACGTCCGCGTCCACGCCCTCGTCCTCGTCCGCGCCCTCGT | QREETRPRPRPRP |
| 9Cys-R-H8 | CCGagcgcgtctcgttccgctGGGTCTCCAGGTAGCCCAGCTGGTA | RPRPRPRPRPRPR |
| (“H8” | GCCCAACCTCTACCGAAGAAGGTACCTCTGAATCCGCTA | PSASRSAGSPGSP |
| disclosed | CTCCAGAATCCGGTCCTGGTACTAGCACTGAGCCAAGCG | AGSPTSTEEGTSE |
| as SEQ ID | AAGGTTCTGCTCCAGGCTCCCCGGCAGGTAGCCCTACCTC | SATPESGPGTSTE |
| NO: 20) | TACCGAAGAGGGCACTAGCACCGAACCATCTGAGGGTTC | PSEGSAPGSPAGS |
| | CGCTCCTGGCACCTCCACTGAACCGTCCGAAGGCAGTGCT | PTSTEEGTSTEPS |
| | CCGGGTACTTCCGAAAGCGCAACTCCGGAATCCGGCCCT | EGSAPGTSTEPSE |
| | GGTTCTGAGCCTGCTACTTCCGGCTCTGAAACTCCAGGTA | GSAPGTSESATPE |
| | GCGAGCCAGCGACTTCTGGTTCTGAAACTCCAGGTTCACC | SGPGSEPATSGSE |
| | GGCGGGTAGCCCGACGAGCACGGAGGAAGGTACCTCTGA | TPGSEPATSGSET |
| | GTCGGCCACTCCTGAGTCCGGTCCGGGCACGAGCACCGA | PGSPAGSPTSTEE |
| | GCCGAGCGAGGGTTCAGCCCCGGGTACCAGCACGGAGCC | GTSESATPESGPG |
| | GTCCGAGGGTAGCGCACCGGGTTCTCCGGCGGGCTCCCC | TSTEPSEGSAPGT |
| | TACGTCTACGGAAGAGGGTACGTCCACTGAACCTAGCGA | STEPSEGSAPGSP |
| | GGGCAGCGCGCCAGGCACCAGCACTGAACCGAGCGAAG | AGSPTSTEEGTST |
| | GCAGCGCACCTGGCACTAGCGAGTCTGCGACTCCGGAGA | EPSEGSAPGTSTE |
| | GCGGTCCGGGTACGAGCACGGAACCAAGCGAAGGCAGC | PSEGSAPGTSESA |
| | GCCCCAGGTACCTCTGAATCTGCTACCCCAGAATCTGGCC | TPESGPGTSTEPS |
| | CGGGTTCCGAGCCAGCTACCTCTGGTTCTGAAACCCCAGG | EGSAPGTSESATP |
| | TACTTCCACTGAACCAAGCGAAGGTAGCGCTCCTGGCAC | ESGPGSEPATSGS |
| | TTCTACTGAACCATCCGAAGGTTCCGCTCCTGGTACGTCT | ETPGTSTEPSEGS |
| | GAAAGCGCTACCCCTGAAAGCGGCCCAGGCACCTCTGAA | APGTSTEPSEGSA |
| | AGCGCTACTCCTGAGAGCGGTCCAGGCTCTCCAGCAGGT | PGTSESATPESGP |
| | TCTCCAACCTCCACTGAAGAAGGCACCTCTGAGTCTGCTA | GTSESATPESGPG |
| | CCCCTGAATCTGGTCCTGGCTCCGAACCTGCTACCTCTGG | SPAGSPTSTEEGT |
| | TTCCGAAACTCCAGGTACCTCGGAATCTGCGACTCCGGA | SESATPESGPGSE |
| | ATCTGGCCCGGGCACGAGCACGGAGCCGTCTGAGGGTAG | PATSGSETPGTSE |
| | CGCACCAGGTACCAGCACTGAGCCTTCTGAGGGCTCTGC | SATPESGPGTSTE |
| | ACCGGGTACCTCCACGGAACCTTCGGAAGGTTCTGCGCC | PSEGSAPGTSTEP |
| | GGGTACCTCCACTGAGCCATCCGAGGGTTCAGCACCAGG | SEGSAPGTSTEPS |
| | TACTAGCACGGAACCGTCCGAGGGCTCTGCACCAGGTAC | EGSAPGTSTEPSE |
| | GAGCACCGAACCGTCGGAGGGTAGCGCTCCAGGTAGCCC | GSAPGTSTEPSEG |
| | AGCGGGCTCTCCGACAAGCACCGAAGAAGGCACCAGCAC | SAPGTSTEPSEGS |
| | CGAGCCGTCCGAAGGTTCCGCACCAACGGCAGAGGCAGC | APGSPAGSPTSTE |
| | AGGTTGTGGTACAGCAGAAGCAGCTCCGGGTAGCGAGCC | EGTSTEPSEGSAP |
| | TGCAACCAGCGGTTCTGAGACGCCGGGCACTTCCGAATC | TAEAAGCGTAEA |
| | TGCGACCCCGGAGTCCGGTCCAGGTTCAGAGCCGGCGAC | A |
| | GAGCGGTTCGGAAACGCCGGGTACTGCTGAAGCGGCTGG | PGSEPATSGSETP |
| | TTGTGGTACTGCTGAAGCTGCATCGACCGAACCAAGCGA | GTSESATPESGPG |
| | AGGTTCGGCACCGGGTACTAGCGAGAGCGCAACCCCTGA | SEPATSGSETPGT |
| | AAGCGGTCCGGGCAGCCCGGCAGGTTCTCCAACCAGCAC | AEAAGCGTAEAA |
| | CGAAGAAGGTTCCCCTGCTACTGCCGAAGCTGCAGGCTG | S |
| | CGGTACTGCGGAGGCGGCGTCCCCAACTTCTACTGAGGA | TEPSEGSAPGTSE |
| | AGGTACTTCTGAGTCCGCTACCCCAGAAAGCGGTCCTGGT | SATPESGPGSPAG |
| | ACCTCCACTGAACCGTCTGAAGGCTCTGCACCAGGCACTT | SPTSTEEGSPATA |
| | CTGAGTCTGCTACTACCGCCGAAGCCGCTGGTTGTGGTAC | EAAGCGTAEAAS |
| | CGCAGAAGCTGCATCTGAGACTCCAGGCACTTCTGAGTC | P |
| | CGCAACGCCTGAATCCGGTCCTGGTTCTGAACCAGCTACT | TSTEEGTSESATP |
| | TCCGGCAGCGAAACCCCAGGTACCTCTGAGTCTGCGACT | ESGPGTSTEPSEG |
| | CCAGAGTCTGGTACCGCGGAAGCGGCTGGTTGTGGTACT | SAPGTSESATTAE |
| | GCAGAGGCAGCTGGTTCTCCGGCTGGTAGCCCGACCAGC | AAGCGTAEAASE |
| | ACGGAGGAGGGTACGTCTGAATCTGCAACGCCGGAATCG | T |
| | GGCCCAGGTTCGGAGCCTGCAACGTCTGGCAGCGAAACC | PGTSESATPESGP |
| | CCGGGTACCACGGCGGAAGCGGCAGGTTGTGGCACCGCG | GSEPATSGSETPG |
| | GAGGCAGCAGCTGGTTCTCCAACCTCTACCGAGGAGGGT | TSESATPESGTAE |
| | TCACCGGCAGGTAGCCCGACTAGCACTGAAGAAGGTACT | AAGCGTAEAAGS |
| | AGCACGGAGCCGAGCGAGGGTAGTGCTCCGGGTACGAGC | P |
| | GAGAGCACGGCAGAAGCCGCTGGCtgcGGTACTGCTGAAG | AGSPTSTEEGTSE |
| | CGGCAACCCCTGAGAGCGGCCCAGGTACTTCTGAGAGCG | SATPESGPGSEPA |
| | CCACTCCTGAATCCGGCCCTGGTAGCGAGCCGGCAACCT | TSGSETPGTTAEA |
| | CCGGCTCAGAAACTCCTGGTTCGGAACCAGCGACCAGCG | AGCGTAEAAAGS |
| | GTACCGCTGAAGCCGCAGGTtgtGGCACTGCGGAAGCTGC | P |
| | AACCGAAGAGGGTACCAGCACGGAACCGAGCGAGGGTT | TSTEEGSPAGSPT |
| | CTGCCCCGGGTACTTCCACCGAACCATCGGAGGGCTCTGC | STEEGTSTEPSEG |
| | ACCTGGTAGCGAACCTGCGACGTCTGGTTCTGAAACGCC | SAPGTSESTAEAA |
| | GACTGCAGAAGCGGCTGGTtgtGGCACCGCCGAAGCAGCTa | GCGTAEAATPES |
| | gcgcctctcgctccgcaCATCACCATCACCACCATCATCACTAA | G |
| | (SEQ ID NO: 1089) | PGTSESATPESGP |
| | | GSEPATSGSETPG |
| | | SEPATSGTAEAA |
| | | G |
| | | CGTAEAATEEGT |
| | | S |
| | | TEPSEGSAPGTST |
| | | EPSEGSAPGSEPA |
| | | TSGSETPTAEAAG |
| | | CGTAEAASASRS |
| | | A |
| | | HHHHHHHH (SEQ |
| | | ID NO: 1090) |

### Example 17: Fermentation of XTEN for Conjugation

[0487] Starter cultures were prepared by inoculating glycerol stocks of E. coli carrying the plasmid containing the appropriate XTEN for conjugation protein sequences into 125 mL of LB Broth media containing 50 μg/mL kanamycin. The cultures were then shaken overnight at 37° C. The starter culture was used to inoculate 2 L of fermentation batch media containing −12.5 g ammonium sulfate, 15 g potassium phosphate dibasic anhydrous, 2.5 g sodium citrate dihydrate; 8.5 g sodium phosphate monobasic monohydrate; 50 g NZ BL4 soy peptone (Kerry Bioscience #5X00043); 25 g yeast extract (Teknova #Y9020); 1.8 L water, 0.5 mL polypropylene glycol; 2.5 mL trace elements solution (Amunix recipe 144-1); 17.5 mL 1M magnesium sulfate; and 2 mL Kanamycin (50 mg/mL)—in 5 L glass jacketed vessel with a B. Braun Biostat B controller. The fermentation control settings were: pH=6.9+/−0.1; d02=10%; dissolved oxygen cascade in stirrer only mode with a range of 125-1180 rpm; air flow of 5 liters per minute of 90% oxygen; initial temperature 37° C.; base control 13% ammonium hydroxide; and no acid control. After 6 hours of culture a 50% glucose feed was initiated at a rate of 30 g/hr. After 20 hours of culture, 25 mL of 1M magnesium sulfate and 3 mL of 1M IPTG were added. After a total fermentation run time of 45 hours the culture was harvested by centrifugation yielding cell pellets between 0.45-1.1 kilograms in wet weight for all constructs. The pellets were stored frozen at −80° C. until further use. Culture samples at multiple time points in the fermentation were taken, the cells were lysed, then cell debris was flocculated with heat and rapid cooling, clarified soluble lysates were prepared by centrifugation and analyzed by a regular non-reducing SDS-PAGE using NUPAGE 4-12% Bis-Tris gel from Invitrogen according to manufacturer's specifications with Coomassie staining. An example of the accumulation of XTEN fusion protein as a function of fermentation run time is shown in FIG. 45. The results showed that the XTEN fusion protein constructs were expressed at fermentation scale with titers >1 g/L, with an apparent MW of about 160 kDa (note: the actual molecular weight are 100 kDa. The observed migration in SDS-PAGE was comparable to that observed for other XTEN-containing fusion proteins).

### Example 18: Purification of 1× Thiol-XTEN (Cysteine-Engineered XTEN) Reagent with CBD and His8 Tags (SEQ ID NO: 20)

[0488] The example describes the purification of a cysteine-engineered XTEN comprising a single cysteine residue.

[0489] Materials and Methods:

[0490] 1. Clarification

[0491] 20 gm of cell paste from the fermentation was resuspended in 100 ml of 20 mM sodium phosphate, pH 8.0 (Lysis Buffer). Cell lysate was homogenized between 800-900 bars three times in a homogenizer. 50 ml of lysis buffer was used as a chase to retrieve hold-up volume from the homogenizer. The homogenized lysate was incubated in a water bath at 85° C. for 20 minutes, followed by quick cooling in an ice water bath for 20 minutes. After the heating & cooling treatment, the lysate was centrifuged at 11000 RPM for 90 minutes in SORVALL centrifuge. After centrifugation, the supernatant was filtered through two CUNO Bio cap 25 (BC0025 L90SP08A) filters. Filters were chased with 40 ml of lysis buffer. The final volume of clarified material was 230 ml. The clarified supernatant was stored at 4° C. overnight.

[0492] 2. Capture Step: Hydrophobic Interaction Chromatography

[0493] Hydrophobic interaction chromatography was used as a first step using hydrophobic CBD tag of XTEN to ensure the capture of N-terminal intact protein. Toyopearl Phenyl 650M (Part #0014783, TOSOH Bioscience) was used to pack XK16 to 15 cm bed height (30 ml column volume). The chromatography was performed using AKTA FPLC (GE Biosciences). Toyopearl Phenyl resin was equilibrated with 2 column volume of 20 mM Sodium Phosphate, 1M Sodium Sulfate, pH 8.0 prior to loading. HIC load was prepared by adding Sodium Sulfate to 1 M concentration to above clarified lysate (final volume ˜250 ml). The sample was loaded on HIC resin (˜4 mg/ml resin load) at 2 ml/min. Load was completed by chasing with ˜9 column volume of equilibrium buffer (20 mM Sodium Phosphate, 1M Sodium Sulfate, pH 8.0) till UV215 was stable. Protein was step eluted with 100% B (20 mM Sodium Phosphate, pH 8.0). A total of 7 column volumes of elution buffer was applied to confirm complete elution (FIG. 46).

[0494] Samples were analyzed by 4-12% Bis-Tris SDS-PAGE (non-reducing) to determine elution pool (FIG. 47). Based on the following gel elution, fractions E1, E2, E3 & E4 were pooled for further processing. The total protein was estimated to be 85 mg in HIC elution pool, with a 65% step yield determined by running another quantitation gel.

[0495] 3. Polishing/Capture Step: Toyopearl IMAC Chromatography

[0496] IMAC affinity chromatography was used as a capture step for binding to intact C-terminal His-tag of XTEN. A chromatography column XK26 was packed with Toyopearl IMAC 650 M (Part #0014907, TOSOH Biosciences) with 15 cm bed height (85 ml Column volume). The column was equilibrated with 2 column volume of 20 mM sodium phosphate, 10 mM imidazole, 0.25 M NaCl, pH 8.0 (equilibrium buffer). IMAC load was prepared by adding SM NaCl to the HIC elution pool to make 0.25 M NaCl in the final volume. The sample was loaded on IMAC resin at 4 ml/min flow rate. The load was completed by 2 column volumes of equilibrium buffer. Resin was washed with 2 column volumes of 20 mM Sodium Phosphate, 10 mM Imidazole, pH 8.0 to remove salt. A linear elution was performed from 0 to 100% B in 7 column volume with buffer A (20 mM Sodium Phosphate, 10 mM Imidazole, pH 8.0) and buffer B (20 mM Sodium Phosphate, 200 mM imidazole, pH 8.0) followed by 2 CV of 100% B. Presence of imidazole maintained UV 215 absorbance above 3500 mAu with AKTA FPLC, so an elution peak was not observed. The flow through, wash and elution fractions were analyzed by 4-12% Bis-Tris non-reducing SDS-PAGE gel (FIGS. 48A and 48B). The gel shows the successful removal of host cell protein and truncated XTEN species (FIG. 48A). Based on the second gel (FIG. 48B), fractions C5, C6 & C7 were pooled. A total of 70 mg of protein was estimated in the IMAC elution pool.

[0497] 4. Trypsin Digestion of IMAC Elution Pool

[0498] Trypsin digestion of IMAC elution pool was performed at a 1:200 m/m ratio. 0.35 mg of bovine trypsin from pancreas (Sigma, cat #T1426) was incubated with 70 mg of Protein (IMAC elution pool) overnight at 37° C. Non-reducing 4-12% Bis-Tris SDS-PAGE analysis was performed to confirm that cleavage of the CBD tag was completed as shown in FIG. 49.

[0499] 5. Polishing Step: MacroCap Q Chromatography

[0500] After trypsin digestion, cleaved tags were separated using MacroCap Q chromatography. An XK 16 column was packed with 18 cm bed height with MacroCap Q (GE Life Sciences, Cat #17-5469-02). Trypsin digested IMAC elution pool was incubated for 1 hour at 37° C. with 2 mM TCEP to reduce dimers of XTEN prior to loading on MacroCap Q column. Column was equilibrated with 20 mM HEPES, pH 7.0. The sample was loaded at 4 ml/min (˜2 mg/ml resin load). Column loading was completed with additional 2 column volume of 20 mM HEPES, 2 mM TCEP pH 7.0. The column was washed with 2 column volumes of (20 mM HEPES, 2 mM TCEP, 150 mM NaCl pH 7.0). A linear gradient elution from 150 mM NaCl to 500 mM NaCl in 20 mM HEPES, 2 mM TCEP, pH 7.0 buffer was performed over 20 column volumes. UV 215 was observed at a high level during the entire chromatography (FIG. 50) due to presence of TCEP, but the elution peak was observed between 22 to 30 mS/cm. All samples were analyzed by SDS-PAGE, silver staining and C18 RP-HPLC. Removal of cleaved CBD was observed in the flow through (FIG. 51A), while very faint bands of XTEN were observed in elution fractions (FIG. 51B) in elution fractions E11, E12, F12, F11, F10 . . . F6). Separation of truncation species of XTEN were observed by silver staining in earlier elution fractions E11, E12, F12 & F11 as species migrating faster than the main XTEN polypeptide (FIG. 51C). Based on the above results, elution fractions were further analyzed by C18 RP-HPLC. FIG. 52 shows the stacked chromatography profiles of the RP-HPLC analysis. Earlier elution fractions had wide leading shoulder indicating significant presence of truncated species. Also, these earlier fractions (E12, F12 & F11) were enriched with proteolysis tags. Based on the above analysis, elution fractions F10, F9, F8, F7 and F6 were pooled. The elution pool was analyzed again by C18 RP-HPLC (FIG. 53). The purified protein was found to be 97.5% pure.

[0501] 6. Concentration and Diafiltration (Final Formulation)

[0502] The above MacroCap Q pool was concentrated using Amicon Ultracel-15 (MWCO 10k) centrifugal device to 5 ml followed by 7× diafiltration with 20 mM HEPES pH 7.0 to a final protein concentration of 8.13 mg/ml. Total of 43 mgs of protein was purified from 20 gm of cell pellet. The overall recovery for three step chromatography was estimated at˜33%.

### Example 19: Purification of 1× Amino-XTEN Reagent with CBD and His8 Tags (SEQ ID NO: 20)

[0503] Purification of amino-XTEN was performed essentially as described for the purification of the 1× Thiol-XTEN containing one cysteine (see Example 15 for details). 20 gm of cell paste from fermentation was homogenized in 100 ml of 20 mM sodium phosphate, pH 8.0 (Lysis Buffer), heat treated and clarified by centrifugation and filtration. Hydrophobic interaction chromatography was used as a first step to capture N-terminal intact protein (FIG. 54). Fractions E2, E3, & E4 were pooled for further processing. IMAC affinity chromatography was used as a capture step to bind intact C-terminal His-tag of XTEN (FIG. 55). Fractions E2 and E3 were pooled. Trypsin digestion of IMAC elution pool was performed at 1:200 m/m ratio overnight at 37° C. After trypsin digestion cleaved tags were separated using MacroCap Q chromatography. Fractions were analyzed by SDS-PAGE followed by silver staining (FIG. 56) and C18 RP-HPLC (FIG. 57). Based on above analysis elution fractions C10, CI1 and C12 were pooled. Elution pool was analyzed again by C18 RP-HPLC (FIG. 58). Protein was found to be >98% pure. MacroCap Q pool was concentrated using Amicon Ultracel-15 (MWCO 10k)centrifugal device at 3000 RPM to 5 ml followed by 7× diafiltration with 20 mM HEPES pH 7.0 to final protein concentration to 5.35 mg/ml.

### Example 20: Purification and Assessment of RP11/His8-XTEN (“His8” Disclosed as SEQ ID NO: 20) Two-Tag System

[0504] Using expression vectors as described above, two-tagged XTEN proteins were constructed to encode fusion proteins with the following amino acid sequences or components: MKIKTGARILALSALTTMMFSASALAAPTTAGAG-Tag-XTEN_AE869(Am1)-RHHHHHHHH (“MKIKTGARILALSALTTMMFSASALAAPTTAGAG” and “RHHHHHHHH” disclosed as SEQ ID NOS 1091 and 1092, respectively), where: MKIKTGARILALSALTTMMFSASALA (SEQ ID NO: 1093) is a MalE recognition sequence that is cleaved from the polypeptide expressed and transported to the host cell periplasm, APTTAGAG (SEQ ID NO: 1094) is a spacer, and Tag is from the following (tag name followed by sequence in parentheses): RP5 (RPRPRPRPRPGR) (SEQ ID NO: 1095); RP7 (RPRPRPRPRPRPRPGR) (SEQ ID NO: 1096); KPS (KPKPKPKPKPGR) (SEQ ID NO: 1097); RP9 (RPRPRPRPRPRPRPRPRPGR) (SEQ ID NO: 1098); RP11 (RPRPRPRPRPRPRPRPRPRPRPGR) (SEQ ID NO: 1099); PSK4P9 (RPRPKPRPKPRPKPRPKPGR) (SEQ ID NO: 1100); and R6K5P11 (RPRPKPRPKPRPKPRPKPRPKPGR) (SEQ ID NO: 1101). All variations of the constructs with tags were made and the proteins were expressed in E. coli using the methods as described in Example 15. Soluble extracts were prepared from the host cell for SDS-PAGE/Coomassie staining analysis. By analysis, the N-terminal tag length and amino acid composition did not affect protein expression noticeably (see FIG. 59) for expression of constructs with RP7, RP9, RP11 and R6K5P11 tags. Expressed proteins with the RP5, RP7, RP9 and RP11 tags proteins were further tested for binding to MacroCap SP resin. Proteins with longer tags bound more efficiently to cation exchange resin, and remained bound under more stringent wash conditions. Thus RP11 tag was selected as N-terminal tag for purification of XTEN using cation exchange chromatography. An additional experiment showed that RP11-XTEN-His8 (“His8” disclosed as SEQ ID NO: 20) polypeptide was efficiently expressed in fermenter and most of the expressed protein was found in the cell pellet fraction (FIG. 60).

### Example 21: Purification of 1× Amino-XTEN Reagent with RP11/H8 (“H8” Disclosed as SEQ ID NO: 20) Two-Tag System

[0505] 1. Expression

[0506] The RP11-XTEN-His8 (“His8” disclosed as SEQ ID NO: 20) precursor of 1× Amino-XTEN was produced by expression in transformed E. coli using a 4 L fermentation reaction as described. Cells were harvested by centrifugation and frozen at −80° C. until use.

[0507] 2. Lysis and Clarification

[0508] 25 g of cell paste was resuspended in 75 mL of 20 mM sodium phosphate pH 8.0, 50 mM NaCl, 2 mM EDTA. Lysis was performed by passing the resuspended paste through a homogenizer at 800-900 bar three times. Homogenate was held at 85° C. in a water bath for 15 min before it was quickly cooled down using an ice/water bath until the temperature dropped to below 10° C. The treated homogenate was then centrifuged at 10,000 rpm in SLA-3000 rotor for 60 minutes. Supernatant was collected and filtered using a 0.22 μm bottletop filter.

[0509] 3. Cation Exchange Capture Step

[0510] Cation exchange chromatography was used as a capture step to ensure N-terminal integrity of the product. MacroCap SP resin (GE Healthcare) was selected among several cation exchange media due to its superior capacity and selectivity for the product. A 20 mL MacroCap SP column was packed in a Redi-Sep housing and equilibrated with 20 mM sodium phosphate (pH 8.0), 20 mM NaCl buffer. The lysate was loaded onto the column by gravity. Three column volumes (CV) of 20 mM sodium phosphate pH 8.0, 100 mM NaCl was applied as the wash step before protein was step-eluted with 3 CVs of 20 mM sodium phosphate pH 8.0, 500 mM NaCl. Half CV fractions (10 mL) were collected for elutions and analyzed by 4-12% Bis-Tris SDS/PAGE (FIG. 61). Elution fractions 2-4 were combined for the subsequent chromatography step.

[0511] 4. IMAC Polishing Step

[0512] A 20-mL ToyoPearl AF-Chelate column was packed in a Redi-Sep column housing and charged with 100 mM nickel sulfate. The column was equilibrated with 20 mM sodium phosphate pH 8.0, 500 mM NaCl before the MacroCap SP pool was loaded onto the column by gravity. Two wash steps were applied using 20 mM sodium phosphate (pH 8.0), 500 mM NaCl, 5 mM imidazole buffer followed by 20 mM sodium phosphate (pH 8.0), 5 mM imidazole. Product was then eluted from the column using 20 mM sodium phosphate, 100 mM imidazole and half CV (10 mL) fractions were collected for 4 CVs of elution. Samples from each step were examined by 4-12% Bis-Tris SDS/PAGE (FIG. 62). Based on the gel, elutions 2 and 3 were pooled for further processing. The overall yield was 30%.

[0513] 5. Trypsin Digestion of IMAC Elution Pool

[0514] Trypsin digestion of the IMAC pool was performed at 1:200 and 1:500 m/m ratio by adding 1 mg/mL bovine trypsin (Sigma, Cat #T1426, Trypsin from Bovine Pancreas) to the IMAC pool. The reaction mixtures were held at 37° C. overnight and the completion of digestion was confirmed by MALDI-TOF mass spectrometry. Pre- and post-digest samples were analyzed by 4-12% Bis-Tris SDS/PAGE stained by both Coomassie and silver stain (FIGS. 63A and 63B). Fainter staining on Coomassie-stained gel as well as the shifting of the molecule weight for the post-digestion samples, when compared to pre-digestion sample, indicates the successful removal of both N- and C-terminal tags. A silver stained gel showed homogeneous bands after digestion, suggesting the absence of truncated species in the sample, supporting the conclusion that the RP11/1H8 (“H8” disclosed as SEQ ID NO: 20) two-tag system and purification methods provides a homogeneous final XTEN product.

### Example 22: Purification of XTEN with RP11 and His8 (SEQ ID NO: 20) Affinity Tags

[0515] 1. Expression

[0516] The fusion protein RP11-XTEN-His8 (“His8” disclosed as SEQ ID NO: 20), with two affinity tags linked to XTEN at the N- and C-terminus, respectively, was expressed in E. coli using a 4 L fermentation reaction using conditions described.

[0517] 2. Lysis and Clarification

[0518] After growth, the cells were harvested by centrifugation and frozen at −80° C. until use. The cell pellet was resuspended in lysis buffer (20 mM sodium phosphate, 50 mM NaCl, 2 mM EDTA pH 8.0, 3 ml buffer per gram cell paste). The cells were lysed by passing through an APV homogenizer three times at a pressure of 830-900 bar. Lysis buffer (1 ml buffer per gram cell paste) was used as a chase to retrieve hold up volume from the homogenizer. The homogenized lysate was incubated in a water bath at 85° C. for 20 minutes, followed by quick cooling in ice water bath for 20 minutes. After the heating and cooling treatment, the lysate was centrifuged at 11000 RPM for 90 minutes in a SORVALL centrifuge. After centrifugation, the supernatant was filtered through two CUNO Bio cap 25 (BC0025 L90SP08A) filters. The clarified supernatant was stored at 4° C. overnight.

[0519] 3. Capture Step: Toyopearl IMAC Chromatography

[0520] IMAC affinity chromatography was used as a capture step for binding the XTEN with an intact C-terminal His-tag. Briefly, the chromatography column BPG140/12 (GE Life Sciences) was packed with 2000 ml Toyopearl IMAC 650 M resin (TOSOH Biosciences). The column was equilibrated with 2 column volumes (CVs) of equilibrium buffer (20 mM sodium phosphate, 500 mM NaCl, pH 8.0). Clarified cell lysate was adjusted to a final NaCl concentration of 500 mM using 5 M NaCl stock solution, and then was loaded onto the IMAC resin. The column was washed with 2 column volumes of equilibrium buffer, and then 2 column volumes of 20 mM sodium phosphate, 500 mM NaCl, 5 mM Imidazole pH 8.0, followed by 2 column volumes of 20 mM sodium phosphate, 5 mM Imidazole pH 8.0 to remove salt. Elution was performed with 2 column volumes of 20 mM sodium phosphate, 100 mM Imidazole, pH 8.0. The flow through, wash and elution fractions were analyzed by non-reducing 4-12% Bis-Tris SDS-PAGE/Coomassie staining and the fractions with the desired product were pooled.

[0521] 4. Polishing/Capture Step: MacroCap SP Chromatography

[0522] Cation exchange chromatography was used as a polishing step to ensure the N-terminal integrity of the product. MacroCap SP resin (GE Life Sciences) was selected among several cation exchange media due to its superior capacity and selectivity for the product. 1000 ml of MacroCap SP resin was packed in a BPG100/13 (GE Life Sciences) chromatography column and equilibrated with 20 mM sodium phosphate pH 8.0, 20 mM NaCl. The IMAC pool was loaded onto the column and the resin was washed with 2 column volumes of 20 mM sodium phosphate, 50 mM NaCl, pH 8.0 and 2 column volumes of 20 mM sodium phosphate pH 8.0, 150 mM NaCl. The protein was eluted with 5 column volumes of linear gradient from 150 to 500 mM NaCl in 20 mM sodium phosphate pH 8.0. Fractions were collected and analyzed by 4-12% Bis-Tris SDS/PAGE. Fractions the with desired product were combined for the next step.

[0523] 5. Trypsin Digestion of Macrocap SP Elution Pool

[0524] Trypsin (Sigma, Trypsin from Bovine Pancreas) digestion of the SP elution pool was performed at 1:200 m/m enzyme/protein ratio overnight at 37° C.

[0525] 6. Polishing Step: Macrocap Q Chromatography

[0526] After trypsin digestion, the cleaved tags were separated from the final product using Macrocap Q chromatography. The BPG100/19 column (GE Life Sciences) was packed with 1500 ml column volume of Macrocap Q resin (GE Life Sciences). The trypsin digested Macrocap SP elution pool was incubated for 15 min at 80° C. with 20 mM DTT and 2 mM EDTA to reduce disulfide bonds and to inactivate trypsin. The cooled protein solution was diluted to a conductivity below 5 mS/cm with Milli-Q water and loaded onto the Macrocap Q column equilibrated with 20 mM HEPES, 50 mM NaCl, pH 7.0. The column was washed with 2 column volumes of 20 mM HEPES, 50 mM NaCl, pH 7.0, then 2 column volumes of 20 mM HEPES, 2 mM TCEP, 150 mM NaCl pH7.0. The protein was eluted with a linear gradient from 150 mM NaCl to 500 mM NaCl in 20 mM HEPES, pH 7.0 in 20 column volumes. Fractions were analyzed by SDS-PAGE/silver staining.

[0527] 7. Concentration and Diafiltration (Final Formulation)

[0528] Selected MacroCap Q fractions were combined and concentrated and using 10 KD Pellicon mini (Millipore) at a feed pressure <20 psi and retentate <8 psi, followed by 10× diafiltratiion with 20 mM HEPES, 50 mM NaCl, pH 7.0 to achieve a final protein concentration of >5 mg/ml.

[0529] 8. Purity Analysis of Proteins Purified with Different Methods

[0530] One batch (Batch 1) was purified through three purification steps as described above. Another batch (Batch 2) was purified from the same fermented material but the MacroCap SP polishing step was omitted. Truncated species of XTEN were detected by SDS-PAGE/silver staining in MacroCap Q elution fractions for Batch 2 (FIG. 87A), while the MacroCap Q elution fractions for Batch 1 were essentially free from truncations (FIG. 87B). These results support that, under the conditions employed, the MacroCap SP step based on the RP11 tag is essential to ensure N-terminal integrity and overall product quality and that the RP11/H8 (“H8” disclosed as SEQ ID NO: 20) two-tag system and purification methods provides a homogeneous final XTEN product.

### Example 23: Conjugation of the DBCO-Mal Linker to 3× Thiol-XTEN to Make an XTEN Precursor

[0531] A 3×-Thiol-XTEN (XTEN_AE905(Am1,C8,C453,C898, Seg 174)) cysteine-engineered XTEN segment was prepared for reaction as a 193 uM (16 mg/ml) solution in 20 mM HEPES, pH 7.0, 50 mM NaCl. DBCO-Maleimide (Click Chemistry Tools, Inc., cat. #A108) was dissolved in DMF to a final concentration of 50 mM. An aliquot of the 3× Thiol-XTEN (5.1 mg, 320 μl) was reduced with 10 mM freshly reconstituted DTT at 70° C. for 20 minutes. The protein sample was diluted to 600 μl total volume with water. 1200 μl of 100% acetonitrile was added and the mixture was centrifuged at 13,000 rpm for 5 minutes. The supernatant was removed, 1000 μl of 80% acetonitrile was added and the mixture was centrifuged at 13,000 rpm for 1 minute. The wash step was repeated once more. The pellet was dissolved in 300 μl 100 mM HEPES pH 7.0. A 7.7 μl 50 mM solution of DBCO-Mal in DMF was added (1:6 molar ratio of 3× Thiol-XTEN to DBCO-Maleimide) and was incubated for 2 hours at 25° C. Completion of modification was monitored by C18 RP-HPLC analysis (FIG. 64A). The protein mixture was purified by hydrophobic interaction chromatography (HIC) using a 1.6 ml Toyopearl butyl column. Elution was performed with a 30 column volume descending gradient of ammonium sulfate from 1.05 M to 0.3M in 20 mM Phosphate, pH 7.0 buffer at 0.5 ml/min flow rate (FIG. 64B). Chromatographic fractions were analyzed by C18 RP-HPLC (FIG. 64C).

### Example 24: Trypsin Cleavage and Purification of Double Tagged Precursor

[0532] Tryosine Digestion

[0533] A double-tagged (CBD/His8) (“His8” disclosed as SEQ ID NO: 20) precursor of XTEN_AE870_Am1,C1 stains well with Coomassie due to the presence of CBD sequence, while a no-tagged version of XTEN_AE870_Am1,C1 stains poorly with Coomassie, but can be detected by silver staining. Therefore, trypsin digestion completeness was monitored using both Coomassie staining (FIG. 65A) and silver staining (FIG. 65B) techniques. The double tagged precursor of XTEN_AE870_Am1,C1 was digested with different ratios of bovine trypsin and proteomics grade porcine trypsin (positive control) in 20 mM phosphate buffer, pH 8: Overnight incubation at 37° C. allowed more complete digestion than overnight incubation at 25° C. based on detection of remaining Coomassie stained 160 kDa band of double tagged precursor (FIG. 65A: all ratios refer to mass/mass ratio of trypsin to substrate). FIG. 65B shows that 1:100, 1:200 and 1:500 ratio digests with bovine trypsin and 1:100 digests with porcine trypsin resulting in efficient digestion of the XTEN precursor.

[0534] MacroCap Q Purification of Trypsin Digested Double Tagged Precursor

[0535] 1:200 ratio of bovine trypsin to double tagged precursor (mass/mass) was used for digestion at 37° C. overnight. FIG. 66A shows >90% conversion of double tagged precursor to digested product. This was demonstrated by disappearance of the Coomassie stained band at ˜160 kDa after digestion and appearance of 20 kDa CBD fragment.

[0536] Trypsin digested material was subjected to step purification using MacroCap Q anion exchange resin and following buffers: A: 20 mM HEPES, 50 mM NaCl, pH 7.5 and B: 20 mM HEPES, 500 mM NaCl, pH 7.5. Digested material was loaded by gravity and eluted in a stepwise manner using 3 column volume washes of 0%, 20%, 40%, 60%, 80% and 100% Buffer B consecutively. XTEN_AE870 eluted in 60% B. FIG. 66B shows that cleaved CBD fragment did not bind to MacroCap Q under used conditions and was completely separated from XTEN. Stepwise elution of XTEN from MacroCap Q only partially separated truncated polypeptides. Better separation was achieved by gradient elution of XTEN (FIG. 66C).

[0537] Test for Residual Trypsin Activity

[0538] To test the presence of residual trypsin activity in the final formulated XTEN preparations, a protein sample was mixed with synthetic [G2]GLP2 peptide at 10:1 mass/mass ratio. A positive control for digestion contained [G2]GLP2 peptide and bovine trypsin; A negative control contained [G2]GLP2 peptide only. All samples were incubated overnight at 37° C. After incubation samples were quenched with 1% TFA and subjected to C18 RP-HPLC analysis using Phenomenex Jupiter C18 Sum 300A analytical column. Buffer A contained 0.1% TFA, 99.9% HPLC grade H₂O; Buffer B contained 0.1% TFA, 99.9% HPLC grade Acetonitrile. Analysis was performed using a gradient of 5% B to 50% B over 45 min elution time. FIGS. 67A-67C show the results of RP-HPLC analyses of residual trypsin activity in the XTEN_AE869(Am1,C2) final preparation. FIG. 67A shows the intact GLP2 peptide (41 min retention time). FIG. 67B shows tryptic digest of GLP2 peptide with two characteristic tryptic fragments (33.5 min and 34 min retention time). FIG. 67C shows that GLP2 peptide remained intact after overnight incubation with XTEN and no tryptic fragments were observed. This result indicates that final MacroCap Q purified preparations do not contain any residual trypsin activity.

### Example 25: Fermentation and Purification of Cysteine-Engineered XTEN for Conjugation

[0539] E. coli containing AC292 on a plasmid was grown to saturation overnight in 2×YT and then 200 ml of this culture was used to inoculate a 25 L culture of 2×YT media in a wavebag. Both cultures were in the presence of 50 μg/ml kanamycin. The second culture was grown to an OD600 of ˜1.0 at 37° C., chilled to 26° C., and induced with 12 ml of 1M IPTG overnight. The cell pellet was harvested at 4000 rpm in a SLA-3000 rotor spinning for 20 minutes. The cell pellet (184 g) was resuspended in 736 ml of 20 mM Tris pH 6.8, 50 mM NaCl. The resuspended cells were lysed with a microfluidizer at 20,000 psi and then heated to 75° C. for 15 minutes, followed by rapid cooling on ice for 30 minutes. The lysate was then clarified by centrifugation. The clarified lysate was then loaded on to a DE52 column, previously sanitized with NaOH and equilibrated with 20 mM Tris pH 6.8, 50 mM NaCl. The column was washed with 5 column volumes of 20 mM Tris pH 6.8, 50 mM NaCl, 5 column volumes of 20 mM Tris pH 6.8, 150 mM NaCl and eluted with 5 column volumes of 20 mM Tris pH 6.8, 250 mM NaCl. The pooled elution fractions. were then loaded on to a macrocapQ column, previously sanitized with NaOH and equilibrated with 20 mM Tris pH 6.8, 50 mM NaCl. The column was washed with 9 column volumes of 20 mM Tris pH 6.8, 50 mM NaCl, 9 column volumes of 20 mM Tris pH 6.8, 100 mM NaCl and eluted with 9 column volumes of 20 mM Tris pH 6.8, 250 mM NaCl. The pooled elution fractions were adjusted to a 15% w/v sodium sulfate and then loaded on to a octyl sepharose FF column column, previously sanitized with NaOH and equilibrated with Tris pH 7.5. The column was washed with 4 column volumes of 20 mM Tris pH 7.5 15% w/v sodium sulfate, and eluted with 4 column volumes of 20 mM Tris pH 7.5, 5% w/v sodium sulfate. The sample was stored at 4° C., and given the lot #AP197. The purified cysteine-engineered XTEN could then serve as a suitable reactant for conjugation with a payload, such as a drug from Table 11, resulting in an XTEN-drug conjugate.

### Example 26: Conjugation of GLP2-Cys to 1× Amino-XTEN to Result in XTEN-Payload of GLP2-XTEN

[0540] A 1× Amino-XTEN (XTEN_AE869(Am1)) was prepared as 67 uM (5.35 mg/ml) solution in 20 mM HEPES, pH 7.0, 50 mM NaCl. Sulfo-SMCC (Thermo Scientific, cat. #22322) was prepared fresh as 100 mM solution in DMSO. 10 mg of amino-XTEN (1.87 ml) was mixed with 15-molar excess of sulfo-SMCC (18.7 ul) and incubated for 1 hr at 25° C. Excess cross-linker was removed by centrifugal filtration using Amicon Ultra-15, MWCO 5k centrifugal device. A volume of 1.8 ml reaction mixture was mixed with 8 ml 20 mM HEPES pH 7.0, 50 mM NaCl and centrifuged for 20 min in Sorvall RT6000 centrifuge at 3000 rpm, 4° C. The procedure was repeated two more times. Final volume of recovered retentate was 1.8 ml. The GLP2-Cys peptide (CSBio, custom synthesis) was dissolved in 20 mM HEPES pH 7.0, 50 mM NaCl to the final concentration 3 mg/ml. N-Maleimide-XTEN was mixed with 2.3-fold molar excess of GLP2-Cys peptide and was incubated for 1 hr at 25° C. Completion of the modification was monitored by C18 RP-HPLC. 20 μg protein samples were loaded on Phenomenex Jupiter C18 5 uM 300 A 4.6 mm×150 mm column. Proteins were eluted with 5-50% gradient of acetonitrile in 0.1% trifluoroacetic acid and detected by absorbance at 214 nm. Essentially all N-maleimide-XTEN was converted into GLP2-Cys-XTEN conjugate, as demonstrated by HPLC and electrospray mass spectrometry (ESI-MS analysis of samples performed on 100 μg protein samples desalted using NanoSep 3K Omega centrifugal devices (Pall Corp.). Protein solutions in 50% acetonitrile, 0.5% formic acid were infused into high-resolution mass spectrometer at flow rate 10 ul/min. Spectra were acquired in 800-1600 amu range and reconstructed into zero-charge spectra using Bayesian Protein Reconstruction Software) (FIGS. 68A-68C). Unreacted XTEN and GLP2 peptide were separated from the conjugate by consecutive anion exchange (MacroCap Q) and hydrophobic interaction (Toyopearl Phenyl) chromatographies. The results of RP-HPLC and MS analyses demonstrated the high yield and purity of the reactants and final product (FIGS. 68A-68C).

### Example 27: Conjugation of GLP2-N-Mal to 1× Thiol-XTEN (Cysteine-Engineered XTEN)

[0541] 1× Thiol-XTEN (XTEN_AE880(Am1,C8)(Seg 181) was prepared as 122 uM (9.84 mg/ml) solution in 20 mM HEPES, pH 7.0, 50 mM NaCl. GLP2-N-Maleimide peptide (CSBio, custom synthesis) was dissolved in DMSO to the final concentration 3 mg/ml. 1× Thiol-XTEN (8.8 mg in 900 μl) was mixed with 3-fold molar excess of GLP2-N-Mal peptide and incubated for 1 hr at 25° C. Completion of the modification and the resulting conjugate was monitored by C18 RP-HPLC (20 μg protein samples were loaded on Phenomenex Jupiter C18 5 uM 300 A 4.6 mm×150 mm column. Proteins were eluted with 5-50% gradient of acetonitrile in 0.1% trifluoroacetic acid and detected by absorbance at 214 nm) and electrospray ionization mass spectrometry (ESI-MS analysis of samples was performed on 100 μg protein samples desalted using NanoSep 3K Omega centrifugal devices (Pall Corp.). Protein solutions in 50% acetonitrile, 0.5% formic acid were infused into high-resolution mass spectrometer at flow rate 10 μl/min. Spectra were acquired in 800-1600 amu range and reconstructed into zero-charge spectra using Bayesian Protein Reconstruction Software.) The results of the analysis are shown in FIGS. 69A-69B. The GLP2-XTEN conjugate was purified by preparative C4 RP-HPLC (Vydac Protein C4 300 A 10 mm×250 mm column) using 5-50% gradient of acetonitrile in 0.1% TFA as mobile phase (see FIG. 70A). Final HPLC-purified GLP2-XTEN conjugate was analyzed using Phenomenex Jupiter C18 5 uM 300 A 4.6 mm×150 mm column (see FIG. 70B). The field of purified GLP2-XTEN conjugate was 6.2 mg (70%).

### Example 28: Conjugation of DBCO-Mal to 1× Thiol-XTEN

[0542] 1× Thiol-XTEN (XTEN_AE880(Am1,C8) (Seg 181) was prepared as a 150 uM (12 mg/ml) solution in 20 mM HEPES, pH 7.0, 50 mM NaCl. DBCO-Maleimide (Click Chemistry Tools, Inc., cat. #A108) was dissolved in DMF to a final concentration of 50 mM. A volume of 200 ul (2.4 mg) 1× Thiol-XTEN was adjusted to 100 mM HEPES pH 7.0 using a 1M stock solution. A 1.2 μl volume of 50 mM DBCO-Mal in DMF was added to the protein solution (1:2 molar ratio of 1× Thiol-XTEN to DBCO-Maleimide reagent) and was incubated for 1 hr at 25° C. Completion of the modification reaction was monitored by C18 RP-HPLC (FIG. 71A). The protein mixture was purified by hydrophobic interaction chromatography (HIC) using a 1.6 ml Toyopearl Butyl column. Elution was performed with a 30 column volume of a descending gradient of ammonium sulfate from 1.05 M to 0.3M in 20 mM Phosphate, pH 7.0 buffer at 0.5 ml/min flow rate (FIG. 71B). Chromatographic fractions were analyzed by C18 RP-HPLC (FIG. 71C).

### Example 29: Preparation of A Bispecific Conjugate from Monospecific XTEN Precursors Linked by the N-Termini

[0543] The example describes the creation of an XTEN-payload composition by linking two different XTEN-payload precursors in an N- to N-terminus configuration; one with a payload A and one with a payload B, resulting in a bispecific conjugate.

[0544] As a first step, XTEN molecules containing multiple cysteines (cysteine-engineered XTEN) are prepared using a RP11-His8 (“His8” disclosed as SEQ ID NO: 20) two-tag purification system, described above, and are formulated in 20 mM HEPES, pH 7.0, 50 mM NaCl. A Payload A-maleimide is dissolved in aqueous solution 20 mM HEPES, pH 7.0, DMF or DMCO or any other appropriate solvent depending on reagent solubility. The Payload A-maleimide is added to the cysteine-engineered XTEN in a 2-6 molar excess over XTEN and incubated for 1 hr at 25° C. Completion of modification is monitored by C18 RP-HPLC. The resulting Payload A-XTEN conjugate is purified from contaminants and unreacted components using preparative C4-C18 RP-HPLC. The Payload A-XTEN conjugate is formulated in 20 mM HEPES, pH 7.0, 50 mM NaCl. Next, the Payload A-XTEN conjugate is further modified by adding dibenzylcyclooctyne (DBCO)-NHS ester or DBCO-sulfo-NHS ester in a 10-50 molar excess to the XTEN and incubating 1-2 hrs at 25° C. Completion of the modification is monitored by analytical C18 RP-HPLC. If the conjugation efficiency is low (for example, <90%) or multiple unspecific products are formed, the DBCO-Payload A-XTEN conjugate is purified using preparative C4-C18 RP-HPLC. If the efficiency of DBCO-NHS ester conjugation is high (>90%) with no significant side products, the DBCO-Payload A-XTEN conjugate is purified from excess reagent by buffer exchange using a 10-30 kDa MWCO centrifugal device, acetonitrile precipitation or anion exchange chromatography.

[0545] To create the second XTEN-payload precursor, a Payload B-maleimide is dissolved in aqueous solution 20 mM HEPES, pH 7.0, DMF or DMCO or any other appropriate solvent depending on reagent solubility. Payload B-maleimide is added to the second cysteine-containing XTEN in 2-6 molar excess over XTEN concentration and incubated for 1 hr at 25° C. Completion of modification is monitored by analytical C18 RP-HPLC. The resulting Payload B-XTEN conjugate is purified from contaminants and reactants using preparative C4-C18 RP-HPLC. The Payload B-XTEN conjugate is formulated in 20 mM HEPES, pH 7.0, 50 mM NaCl. Azide-PEG4-NHS ester is added in 10-50 molar excess to the Payload B-XTEN and incubated 1-2 hrs at 25° C. Completion of modification is monitored by C18 RP-HPLC. If the conjugation efficiency is low (for example <90%) or multiple unspecific products are formed, the azide-Payload B-XTEN conjugate is purified using preparative C4-C18 RP-HPLC. If the efficiency of DBCO-NHS ester conjugation is high (>90%) with no significant side products, the azide-Payload B-XTEN conjugate is purified from excess reagent by buffer exchange using a 10-30 kDa MWCO centrifugal device, acetonitrile precipitation or anion exchange chromatography. The final product is created by mixing purified and concentrated DBCO-Payload A-XTEN and azide-Payload B-XTEN proteins in an equimolar ratio in 20 mM HEPES pH 7.0 buffer, 50 mM NaCl and incubated at 25° C. for 1 hr or longer until the reaction is complete. Completion of modification is monitored by C4 or C18 RP-HPLC. If necessary, the bispecific conjugate Payload A-XTEN-Payload B is purified by preparative RP-HPLC, hydrophobic interaction chromatography or anion exchange chromatography.

### Example 30: Preparation of A Trimeric Conjugate from Monospecific XTEN Precursors Linked by the N-Termini

[0546] Monospecific XTEN-payload precursors will be prepared as N-terminal fusions of a Payload A linked to an XTEN molecule; e.g. of lengths ranging from AE144 to AE890, containing a single cysteine at the C-terminus (prepared and purified as described in Example 25). Purified precursors are formulated in 20 mM HEPES, pH 7.0, 50 mM NaCl. Tris-(2-maleimidoethyl)amine (TMEA, Thermo Scientific, cat. #33043) and dissolved in DMSO or DMF. Precursor (4-6 molar excess over cross-linker) and TMEA reagent are mixed and incubated for 1 hr at 25° C. Completion of the modification is monitored by C4 or C18 RP-HPLC or size exclusion chromatography. The resulting trivalent Payload A-XTEN conjugate is purified from protein reactants or partial product mixture by hydrophobic interaction chromatography (HIC), anion exchange chromatography or preparative C4-C18 RP-HPLC.

### Example 31: Conjugation and Purification of FITC-X-XTEN

[0547] Purified protein derived from AC272, lot #AP197, was labeled with FITC maleimide. The sample was reduced by incubating at room temperature with 5 mM TCEP for 1 hour. The sample was then desalted into PBS using DG-10 columns. The sample was labeled by adding a 25-fold molar excess of FITC-maleimide in DMSO and incubating at room temperature for 2 hours. Note that the volume adjusted such that the DMSO concentration was <5% of total solvent. The reaction was quenched by adding 2 mM DTT and then the sample was digested overnight with TEV protease. The sample was diluted two fold with 20 mM Tris pH 7.5 and loaded onto a macrocapQ column, previously sanitized with NaOH and equilibrated with 20 mM Tris pH 7.5. The column was washed with 5 column volumes of 20 mM Tris pH 7.5, 135 mM NaCl, 5 column volumes of 20 mM Tris pH 7.5, 175 mM NaCl and eluted with 5 column volumes of 20 mM Tris pH 7.5, 250 mM NaCl. The pooled elution fractions were then digested with TEV over 60 hours at 4 C to complete the digestion. The digested samples were then twice passed over a 1 ml perloza column previously sanitized with NaOH and equilibrated with 20 mM Tris pH 7.5, 135 mM NaCl. To remove any free FITC the sample was then dialyzed against 20 mM Tris pH 7.5, 135 mM NaCl using a 10,000 MWCO membrane. Co-migration of the OD214 protein signal and OD495 FITC signal in a SEC column indicate successful conjugation of the XTEN with the label, with minimal free dye contamination (FIG. 72B). The successful conjugation is also indicated by apparent large MW of the protein with FITC fluorescence in SDS PAGE (FIG. 72A).

### Example 32: Purification of GFP-X-XTEN

[0548] GFP (AC219) was chemically cross-linked to XTEN by a bifunctional cross-linker with an amine reactive group to couple to the GFP lysines and a cysteine reactive group to couple to the free cysteine engineered into the XTEN in AC292. GFP was labeled with bi-functional cross-linker sulfo-SMCC by incubating at room temperature for 2 hours. The protein was desalted into PBS using DG-10 columns to remove free sulfo-SMCC. Purified protein derived from AC272, lot #AP197 was reduced and desalted into PBS on DG-10 columns and mixed with the labeled GFP to allow for cross-linking. The cross-linking reaction was quenched with 2 mM DTT and TEV added to remove the CBD domain in a overnight incubation at 4° C. The following day additional TEV was added to complete the digestion with an additional 60 hour 4° C. incubation. Following TEV digestion the sample was dilute to 100 ml in 20 mM Tris pH 7.5 and loaded onto a macrocapQ column, previously sanitized with NaOH and equilibrated with 20 mM Tris pH 7.5. The column was washed with 5 column volumes of 20 mM Tris pH 7.5, 5 column volumes of 20 mM Tris pH 7.5, 50 mM NaCl, 5 column volumes of 20 mM Tris pH 7.5, 100 mM NaCl, 5 column volumes of 20 mM Tris pH 7.5, 150 mM NaCl, 5 column volumes of 20 mM Tris pH 7.5, 200 mM NaCl, 5 column volumes of 20 mM Tris pH 7.5, 250 mM NaCl, 5 column volumes of 20 mM Tris pH 7.5, 300 mM NaCl, and 5 column volumes of 20 mM Tris pH 7.5, 500 mM NaCl. The peak elution fractions were pooled and stored at 4° C. Cross-linking was confirm by co-migration of the OD214 protein signal and OD395 GFP signal in a SEC column, with the SEC output shown as overlays in FIG. 73.

### Example 33: Pharmacokinetics of GFP-XTEN and FITC-XTEN Conjugates

[0549] The pharmacokinetics of the GFP-XTEN and FITC-XTEN cross-linked conjugates prepared as described in the Examples above were tested in cynomolgus monkeys. GFP-XTEN and FITC-XTEN were administered to male cynos IV at 2 mg/kg and dose volumes of 0.77 and 0.68 mL respectively. Blood samples (1.0 mL) were collected into prechilled heparinized tubes at predose, 2, 4, 8, 24, 48, 72, 96, 120, 168, 216, 264, 336, 388, 432, 504 hour time points, and processed into plasma. Quantitation was performed by ELISA assay using the anti-XTEN antibody for both capture and detection in the case of GFP-XTEN and anti-XTEN capture and anti-FITC detection in the case of FITC-XTEN. A non-compartmental analysis was performed in WinNonLin with all time points included in the fit to determine the PK parameters. The pharmacokinetic results are summarized in Table 40 and FIG. 74. The data show XTEN can extend the half-life of molecules to which it is chemically conjugated in a manner comparable to genetic fusions to payloads of similar size.

TABLE 40
PK parameters of conjugated XTEN-payload compositions.

| Construct | Cmax (ng/mL) | AUC (hr * ng/mL) | T ½ (hrs) |
|---|---|---|---|
| GFP-X-XTEN (AP197d) | 52800 | 8220000 | 107 |
| FITC-X-XTEN AP197e | 18900 | 3930000 | 84.2 |

[0550] The pharmacokinetics of GFP-L288, GFP-L576, GFP-XTEN_AF576, GFP-XTEN_Y576 and XTEN_AD836-GFP were tested in cynomolgus monkeys to determine the effect of composition and length of the unstructured polypeptides on PK parameters. Blood samples were analyzed at various times after injection and the concentration of GFP in plasma was measured by ELISA using a polyclonal antibody against GFP for capture and a biotinylated preparation of the same polyclonal antibody for detection. Results are summarized in FIG. 75. They show a surprising increase of half-life with increasing length of the XTEN sequence. For example, a half-life of 10 h was determined for GFP-XTEN_L288 (with 288 amino acid residues in the XTEN). Doubling the length of the unstructured polypeptide fusion partner to 576 amino acids increased the half-life to 20-22 h for multiple fusion protein constructs; i.e., GFP-XTEN_L576, GFP-XTEN_AF576, GFP-XTEN_Y576. A further increase of the unstructured polypeptide fusion partner length to 836 residues resulted in a half-life of 72-75 h for XTEN_AD836-GFP. Thus, increasing the polymer length by 288 residues from 288 to 576 residues increased in vivo half-life by about 10 h. However, increasing the polypeptide length by 260 residues from 576 residues to 836 residues increased half-life by more than 50 h. These results show that there is a surprising threshold of unstructured polypeptide length that results in a greater than proportional gain in in vivo half-life. Thus, fusion proteins comprising extended, unstructured polypeptides are expected to have the property of enhanced pharmacokinetics compared to polypeptides of shorter lengths.

### Example 34: Preparation of 1×DBCO,3×LHRH-XTEN by Conjugation

[0551] An aliquot of 1× Amino,3× Thiol-XTEN432 (XTEN_AE432(Am1,C12,C217,C422)) was prepared as a 196 μM (7.7 mg/ml) solution in 20 mM HEPES, pH 7.0, 50 mM NaCl. FIG. 88A shows a C18 RP-HPLC and ESI-MS analysis of the protein. 2,2′-Dipyridyl disulfide (DPD, Sigma, cat. #D5767) was dissolved in dimethylformamide (DMF) to the final concentration 100 mM. 4 ml of 1× Amino,3× Thiol-XTEN432 solution was mixed with 0.2 ml 1 M HEPES, pH 8.0 to adjust the pH to ˜7.5 and with 78 μl DPD solution (10× molar excess over protein). The reaction mixture was incubated for 2 hours at 25° C., and products of the reaction were analyzed by C18 RP-HPLC (FIG. 88B). DBCO-sulfo-NHS (Click Chemistry Tools, Inc., cat. #A124) was dissolved in anhydrous DMF to a final concentration of 10 mM. 0.865 ml of DBCO-sulfo-NHS solution was added to protein solution (11× molar excess over protein). The reaction mixture was incubated for 2 hours at 25° C., and products of reaction were analyzed by C18 RP-HPLC (FIG. 88C). A solution of 1M ethanolamine pH 8.0 was added to a final concentration of 50 mM to quench the unreacted DBCO-sulfo-NHS. The reaction mixture was incubated for 2 hours at 25° C. and then overnight at 4° C. 500 mM Bond-Breaker™ TCEP Solution (Thermo Scientific, cat. #77720) was added to a final concentration 20 mM. The reaction mixture was incubated for 1 hour at 25° C., and the products of reaction were analyzed by C18 RP-HPLC (FIG. 88D). The reaction mixture was diluted to 15 mL with 0.01% TFA and pH adjusted to ˜3 using 10% TFA solution. The protein solution was loaded on a preparative C4 RP-HPLC column Vydac C4 250×22 mm (Grace Davison Discovery Sciences, cat. #214TP1022). The protein was eluted with 1200 ml linear 5-50% gradient of acetonitrile in 0.01% TFA at 15 ml/min flow rate. Fractions containing 1×DBCO,3× Thiol-XTEN432 were adjusted to pH˜7 with 1 M HEPES pH 8 and were concentrated by vacuum evaporation. A Glp-His-Trp-Ser-Tyr-D-Lys-Leu-Arg-Pro-Gly-NH2 (SEQ ID NO: 1102) peptide modified with 3-maleimidopropionic acid at ε-amino group of D-Lys (LHRH-Mal) was synthesized by CSBio Co. (Menlo Park, CA). The peptide was dissolved to a final concentration 25 mg/ml in anhydrous DMF and was added to 1×DBCO,3× Thiol-XTEN432 solution in a 5× molar excess over protein. The reaction mixture was incubated for 1 hr at 25° C., and the products of the reaction were analyzed by C18 RP-HPLC (FIG. 88E). The reaction mixture was diluted to 15 mL with 0.01% TFA and the pH adjusted to ˜3 using a 10% TFA solution. The protein solution was loaded on preparative C4 RP-HPLC column Vydac C4 250×22 mm. The protein was eluted with 1200 ml linear 5-50% gradient of acetonitrile in 0.01% TFA at 15 ml/min flow rate. Fractions containing 1×DBCO,3×LHRH-XTEN432 were adjusted to ˜pH 7 with 1 M HEPES pH 8 and concentrated to 2 ml by vacuum evaporation to yield the final product.

### Example 35: Preparation of 1× Azide,3×MMAE-XTEN by Conjugation

[0552] An aliquot of the fusion protein 1× Amino,3× Thiol-XTEN432 (XTEN_AE432(Am1,C12,C217,C422)) was prepared as 196 μM (7.7 mg/ml) solution in 20 mM HEPES, pH 7.0, 50 mM NaCl. FIG. 89A shows a C18 RP-HPLC and ESI-MS analysis of the protein. MA6-Val-Cit-PAB-MMAE (MMAE-Mal, custom synthesis by Concortis Biosystems, Inc.) was dissolved in dimethylsulfoxide (DMSO) to a final concentration 1 mg/ml. A 2.2 ml volume of 1× Amino,3× Thiol-XTEN432 solution was mixed with 2.5 ml of MMAE-Mal (3.5× molar excess over protein). The reaction mixture was incubated for 1 hr at 25° C., and the products of the reaction were analyzed by C18 RP-HPLC (FIG. 89B). Azide-PEG4-NHS ester (Click Chemistry Tools, Inc., cat. #A103) was dissolved in anhydrous DMF to a final concentration of 500 mM. The reaction mixture (4.7 ml) was mixed with 0.235 ml 1 M HEPES, pH 8.0 and with 9.75 ul 500 mM azide-PEG4-NHS (10× molar excess over protein). The reaction mixture was incubated for 2 hr at 25° C., and the products of reaction were analyzed by C18 RP-HPLC (FIG. 89C). The conjugation mixture was diluted to 15 ml with 0.01% TFA and the pH was adjusted to ˜3 using 10% TFA. The protein solution was loaded onto a preparative C4 RP-HPLC column Vydac C4 250×22 mm (Grace Davison Discovery Sciences, cat. #214TP1022). The protein was eluted with 1200 ml linear 5-50% gradient of acetonitrile in 0.01% TFA at 15 ml/min flow rate. Fractions containing 1× Azide,3×MMAE-XTEN432 were adjusted to ˜pH7 with 1 M HEPES pH 8 and concentrated by vacuum evaporation to yield the final product.

### Example 36: Preparation of 3×LHRH,3×MMAE-XTEN by Conjugation

[0553] An aliquot of the fusion protein 1×DBCO,3×LHRH-XTEN432 was prepared as 143 μM (6.26 mg/ml) solution in 20 mM HEPES, pH 7.0. 1× Azide,3×MMAE-XTEN432 was prepared as a 135 μM (5.90 mg/ml) solution in 20 mM HEPES, pH 7.0. The two protein reactants were mixed in solution to yield a 1.1 molar excess of 1×DBCO,3×LHRH-XTEN432. The reaction mixture was incubated overnight at 25° C. Completion of the click chemistry reaction was analyzed by SDS-PAGE (FIG. 90A) and RP-HPLC (FIG. 90B). The conjugation mixture was diluted to 15 ml with 0.01% TFA and pH adjusted to ˜3 using 10% TFA. The protein solution was loaded onto a preparative C4 RP-HPLC column Vydac C4 250×10 mm (Grace Davison Discovery Sciences, cat. #214TP510). The protein was eluted with 180 ml linear 5-50% gradient of acetonitrile in 0.01% TFA at 2 ml/min flow rate. Fractions containing 3×LHRH,3×MMAE-XTEN were adjusted to ˜pH7 with 1 M HEPES pH 8 and concentrated by vacuum evaporation to yield the final product.

### Example 37: Preparation of 1×LHRH,3×MMAE-XTEN by Conjugation

[0554] An aliquot of the fusion protein 1× Amino,3× Thiol-XTEN905 (XTEN_AE905(Am1,C8,C453,C898, Seg 174)) was prepared as a 131 μM (10.9 mg/ml) solution in 20 mM HEPES, pH 7.0, 50 mM NaCl. FIG. 91A shows a C18 RP-HPLC and ESI-MS analysis of the protein. 2,2′-Dipyridyl disulfide (DPD, Sigma, cat. #D5767) was dissolved in dimethylformamide (DMF) to the final concentration 100 mM. The 1× Amino,3× Thiol-XTEN905 solution was adjusted pH to ˜7.5 using 1 M HEPES pH 8 and mixed with DPD solution (10× molar excess over protein). The reaction mixture was incubated for 2 hr at 25° C., and the products of the reaction were analyzed by C18 RP-HPLC (FIG. 91B). DBCO-sulfo-NHS (Click Chemistry Tools, Inc., cat. #A124) was dissolved in anhydrous DMF to a final concentration 10 mM. DBCO-sulfo-NHS solution was added to the protein solution (10× molar excess over protein). The reaction mixture was incubated for 2 hr at 25° C., and the products of the reaction analyzed by C18 RP-HPLC (FIG. 91C). 1M ethanolamine pH 8.0 was added to a final concentration of 50 mM to quench unreacted DBCO-sulfo-NHS. The reaction mixture was incubated for 2 hr at 25° C. and then overnight at 4° C. A 500 mM Bond-Breaker™ TCEP Solution (Thermo Scientific, cat. #77720) was added to a final concentration 20 mM. The reaction mixture was incubated for 1 hour at 25° C., and the products of the reaction were analyzed by C18 RP-HPLC (FIG. 91D). The reaction mixture was diluted to 15 mL with 0.01% TFA and the pH adjusted to ˜3 using 10% TFA solution. The protein solution was loaded onto preparative C4 RP-HPLC column Vydac C4 250×22 mm (Grace Davison Discovery Sciences, cat. #214TP1022). The protein was eluted with 1200 ml linear 5-50% gradient of acetonitrile in 0.01% TFA at 15 ml/min flow rate. Fractions containing 1×DBCO,3× Thiol-XTEN905 were adjusted to˜pH7 with 1 M HEPES pH 8 and concentrated by vacuum evaporation. MA6-Val-Cit-PAB-MMAE (MMAE-Mal, custom synthesis by Concortis Biosystems, Inc.) was dissolved in dimethylsulfoxide (DMSO) to a final concentration 1 mg/ml. 1×DBCO,3× Thiol-XTEN905 solution was mixed with a 3.5× molar excess of MMAE-Mal. The reaction mixture was incubated for 1 hr at 25° C., and products of the reaction were analyzed by C18 RP-HPLC. The Glp-His-Trp-Ser-Tyr-D-Lys-Leu-Arg-Pro-Gly-NH2 (SEQ ID NO: 1102) peptide was modified with azido-hexanoic acid at the ε-amino group of D-Lys (LHRH-Mal, custom synthesis by CS Bio Co., Menlo Park, CA). The peptide was dissolved to a final concentration 25 mg/ml in anhydrous DMF and added to 1×DBCO,3×MMAE-XTEN905 solution in 1.5-5× molar excess over protein. The reaction mixture was incubated at 25° C., and the products of the reaction were analyzed by C18 RP-HPLC. The final reaction mixture was diluted to 15 mL with 0.01% TFA and pH adjusted to ˜3 using 10% TFA solution. The protein solution was loaded on preparative C4 RP-HPLC column Vydac C4 250×22 mm. The protein was eluted with 1200 ml linear 5-50% gradient of acetonitrile in 0.01% TFA at 15 ml/min flow rate. Fractions containing 1×DBCO,3×LHRH-XTEN432 were adjusted to ˜pH7 with 1 M HEPES pH 8 and concentrated by vacuum evaporation to yield the final product.

### Example 38: Preparation of 1×DBCO,3× Folate(γ)-XTEN by Conjugation

[0555] An aliquot of the fusion protein 1× Amino,3× Thiol-XTEN432 (XTEN_AE432(Am1,C12,C217,C422)) was prepared as a 203 μM (8.0 mg/ml) solution in 20 mM HEPES, pH 7.0, 50 mM NaCl. FIG. 107A shows a C18 RP-HPLC and ESI-MS analysis of the protein. Folate-γ-aminopentyl-maleimide (FA(γ)-Mal, custom synthesis by CPC Scientific) was dissolved in dimethylformamide (DMF) to a final concentration 21 mg/ml (9.8 mM). A 1.1 ml volume of 1× Amino,3× Thiol-XTEN432 solution was mixed with 0.08 ml of FA(γ)-Mal (3.5 molar excess over protein). The reaction mixture was incubated for 2 hrs at 25° C., and the products of the reaction were analyzed by C18 RP-HPLC (FIG. 107B). pH of the reaction mixture was adjusted with 0.06 ml of 1 M HEPES pH 8.0 buffer. DBCO-sulfo-NHS (Click Chemistry Tools, Inc., cat. #A124) was dissolved in anhydrous DMF to a final concentration of 50 mM. 0.53 ml of DBCO-sulfo-NHS solution was added to protein solution (11× molar excess over protein). The reaction mixture was incubated for 2 hours at 25° C., and products of reaction were analyzed by C18 RP-HPLC (FIG. 107C). A solution of 1M ethanolamine pH 8.0 was added to a final concentration of 50 mM to quench the unreacted DBCO-sulfo-NHS. The reaction mixture was incubated for 2 hours at 25° C., and then overnight at 4° C. The reaction mixture was diluted to 15 mL with 0.01% TFA and pH adjusted to ˜3 using 10% TFA solution. The protein solution was loaded on a preparative C4 RP-HPLC column Vydac C4 250×10 mm (Grace Davison Discovery Sciences, cat. #214TP510). The protein was eluted with 180 ml linear 5-50% gradient of acetonitrile in 0.01% TFA at 2 ml/min flow rate. Fractions containing 1×DBCO,3×FA(γ)-XTEN432 were adjusted to pH˜7 with 1 M HEPES pH 8 and were concentrated by vacuum evaporation to yield the final product.

[0556] The 1×DBCO,3× Folate(α)-XTEN conjugate was prepared essentially as described above using folate-alpha-Maleimide (FA(α)-Mal, custom synthesis by CPC Scientific).

### Example 39: Preparation of 3×FA(γ),3×MMAE-XTEN by Conjugation

[0557] An aliquot of the fusion protein 1×DBCO,3×FA(γ)-XTEN432 was prepared as 191 μM (8.8 mg/ml) solution in 20 mM HEPES, pH 7.0. 1× Azide,3×MMAE-XTEN432 (prepared as described in Example 32) was prepared as a 242 μM (11.1 mg/ml) solution in 20 mM HEPES, pH 7.0. The two protein reactants were mixed in solution to yield a 1.1 molar excess of 1×DBCO,3×FA(γ)-XTEN432. The reaction mixture was incubated overnight at 25° C. Completion of the click chemistry reaction was analyzed by RP-HPLC (FIG. 108). The conjugation mixture was diluted to 15 ml with 0.01% TFA and pH adjusted to ˜3 using 10% TFA. The protein solution was loaded onto a preparative C4 RP-HPLC column Vydac C4 250×10 mm (Grace Davison Discovery Sciences, cat. #214TP510). The protein was eluted with 180 ml linear 5-50% gradient of acetonitrile in 0.01% TFA at 2 ml/min flow rate. Fractions containing 3×FA(γ),3×MMAE-XTEN were adjusted to ˜pH7 with 1 M HEPES pH 8 and concentrated by vacuum evaporation to yield the final product. The final product was analyzed by size exclusion chromatography (SEC-HPLC) (FIG. 109A), RP-HPLC (FIG. 109B) and ESI-MS (FIG. 109C).

[0558] The 3×FA(α),3×MMAE-XTEN conjugate was prepared essentially as described above using click reaction between 1×DBCO,3×FA(α)-XTEN432 and 1× Azide,3×MMAE-XTEN432.

### Example 40: Comparison of Viscosity in Solutions of Branched Versus Linear XTEN

[0559] The viscosity of linear and branched XTENs (the latter as trimeric or tetrameric configurations) can be measured using various types of viscometers and rheometers. For example one can measure the time required to draw 1 mL of liquid into a syringe through a 30G needle as described by Miller, M. A., et al. (2010) Langmuir, 26:1067. In order to compare monomeric linear versus trimeric or tetrameric configurations of XTENs to be for viscosity, constructs having equivalent molecular weights for the XTEN amino acid component are prepared and then solutions are made at fixed, equivalent concentrations of protein at 20, 50, 100 mg/ml each. The solutions are then are evaluated using the method of Miller. Using the method, data are obtained with known standards to prepare a standard curve, and then the XTEN solutions are measured. It is expected that results will show that the viscosity of equimolar solutions of XTENs with similar molecular weight will be significantly decrease with increasing branching; a conjugate of 3 arms of XTEN288 will have significantly lower viscosity compared to an equal concentration of linear XTEN864, even though they have equivalent numbers of amino acids. Similarly, it is expected that a configuration with 4 arms of XTEN216 will have even lower viscosity than a conjugate with 3 arms of XTEN288.

### Example 41: Preparation of Her2-XTEN-PTX by Conjugation

[0560] An aliquot of the fusion protein 1× Amino,3× Thiol-XTEN432 (XTEN_AE432(Am1,C12,C217,C422)) is prepared as 196 μM (7.7 mg/ml) solution in 20 mM HEPES, pH 7.0, 50 mM NaCl. Paclitaxel-Mal (PTX-Mal) is custom synthesized by modification of paclitaxel with succinic anhydride followed by conjugation to aminoethylmaleimide. PTX-Mal is dissolved in dimethylformamide (DMF) and added to the protein in a 3.5-5× molar excess. The reaction mixture is incubated for 1-2 hr at 25° C., and the products of the reaction are analyzed by C18 RP-HPLC. Sulfo-SMCC (Thermo Scientific, cat. #22122) is dissolved in anhydrous DMF to a final concentration 50 mM and added to the protein solution in a 10× molar excess over protein. The reaction mixture is incubated for 2 hr at 25° C., and the products of the reaction analyzed by C18 RP-HPLC (see FIG. 92). The reaction mixture is diluted to 15 mL with 0.01% TFA and pH adjusted to ˜3 using 10% TFA solution. The protein solution is loaded on a preparative C4 RP-HPLC column Vydac C4 250×22 mm (Grace Davison Discovery Sciences, cat. #214TP1022). The protein is eluted with a 1200 ml linear 5-50% gradient of acetonitrile in 0.01% TFA at 15 ml/min flow rate. Fractions containing 1× Mal,3×PTX-XTEN432 are adjusted to ˜pH 7 with 1 M HEPES pH 8 and concentrated by vacuum evaporation. Herceptin (Trastuzumab, Roche) antibody is reconstituted in water according to the instructions and is buffer exchanged into PBS pH 7.2 containing 5 mM EDTA. DTT is added to the protein solution to a 1-10 mM final concentration and incubated for 5-30 min at 37° C. Excess DTT is removed by gel filtration or cut-off membrane filtration. 1× Mal,3×PTX-XTEN432 is added to partially reduced antibody in a 3-4× molar excess. The reaction mixture is incubated for 1 hr at 25° C. and the final products of the reaction are analyzed by SDS-PAGE and size exclusion chromatography under non-reducing and reducing conditions.

### Example 42: Preparation of Iodoacetyl-XTEN by Conjugation

[0561] An aliquot of the fusion protein 1× Amino-XTEN869 (XTEN_AE869(Am1) was prepared as a 164 μM (13.1 mg/ml) solution in 20 mM HEPES, pH 7.0, 50 mM NaCl. A 1/20 volume of 1M HEPES pH 8 was added to the protein solution to adjust the pH of the protein solution to ˜7.5. N-succinimidyl iodoacetate (SIA, Thermo Scientific, cat. #22349) was dissolved in anhydrous dimethylformamide (DMF) to a final concentration 100 mM and was added in a 10× molar excess over the protein. The reaction mixture was incubated for 1 hr at 25° C., and the products of the reaction are analyzed by C18 RP-HPLC (FIG. 93A). The excess SIA was removed by buffer exchange using Vivaspin 500 ultracentrifugal device (5,000 MWCO, VivaScience, cat. #VS0112). Modification of the N-terminal amino group by iodoacetyl group did not change the retention time of the modified XTEN (FIG. 93A), therefore the covalent modification was confirmed by ESI-MS (FIG. 93B). Also, the IA-XTEN conjugate efficiently reacted with the cysteine-containing peptide HCKFWW (Bachem, cat. #H-3524) (FIG. 93C).

### Example 43: In Vitro Cell-Based Screening of LHRH-XTEN-Drug Conjugates for Activity and Specificity

[0562] LHRH-XTEN-drug conjugates are assessed for in vitro activity and selectivity. Each LHRH-XTEN-drug conjugate, its corresponding non-targeting XTEN-drug molecule and its respective free drug control are tested in a CellTiter-Glo anti-proliferation assay against a panel of LHRH receptor positive and negative cell lines listed in Table 41. Appropriate assay conditions, including optimal cell density and incubation time are determined using the respective free drug as control. LHRH-XTEN-drug conjugates are tested as follows: cells in log-phase are collected, counted and plated at pre-determined cell density in a 96-well microtiter assay plate. Adherent cells are allowed to attach to the plate by an overnight incubation at 37° C. with an atmosphere of 5% CO₂. The LHRH-XTEN-drug conjugates and corresponding controls are introduced using appropriate dose range dilutions, in duplicate, and the plates are incubated for an additional 2-5 days. After the appropriate incubation period, CellTiter-Glo reagent is added to each well, mixed for 2 minutes on an orbital shaker. The plate is then centrifuged at 90× g and incubated at room temperature for an additional 10 minutes to stabilize the luminescent signal. Luminescence signals are then read on a luminometer and the IC₅₀ (half maximal inhibitory concentration) values are calculated with GraphPad Prism or equivalent software. Quantitative comparisons of the IC₅₀ values will enable ranking of the constructs' activity for inhibition of cell growth and selectivity against LHRH receptor positive versus negative cell lines. It is expected that the results would support the finding that the LHRH-XTEN-drug conjugates will show highly selective potent killing on LHRH receptor positive cells but not on LHRH receptor negative cells. This will be in contrast to the free drug moiety whereby no discrimination in cytotoxicity is expected between LHRH receptor positive and negative cell lines. The XTEN-drug control is expected to yield poor cytotoxic activity. LHRH-XTEN-drug conjugates with favorable activity and cell line selectivity relative to controls will be further verified for LHRH receptor association by the addition of free competitive LHRH peptide in the assay, resulting in impaired LHRH-XTEN-drug cytotoxicity, further verifying the selective activity of the constructs.

TABLE 41
LHRH receptor positive and negative cell lines

| Cell line | Tissue | LHRHR status |
|---|---|---|
| MCF-7 | Breast | Positive |
| MDA-MB-231 | Breast (HER2−/ER−/PR−) | Positive |
| HCC1806 | Breast (HER2−/ER−/PR−) | Positive |
| HCC1937 | Breast (HER2−/ER−/PR−) | Positive |
| OV-1063 | Ovarian | Positive |
| EFO-21 | Ovarian | Positive |
| EFO-27 | Ovarian | Positive |
| NIH: OVCAR-3 | Ovarian | Positive |
| BG-1 | Ovarian | Positive |
| HEC-1A | Endometrial | Positive |
| HEC-1B | Endometrial | Positive |
| Ishikawa | Endometrial | Positive |
| KLE | Endometrial | Positive |
| AN-3-CA | Endometrial | Positive |
| MiaPaCa | Pancreatic | Positive |
| Panc-1 | Pancreatic | Positive |
| rat Dunning R-3327-H | Prostate (androgen-dep) | Positive |
| PC-82 | Prostate (androgen-dep) | Positive |
| MDA-PCa-2b | Prostate (androgen-indep) | Positive |
| C4-2 | Prostate (androgen-dep) | Positive |
| (derivative of LNCaP) | | |
| A549 | Lung | Positive |
| UCI-107 | Ovarian | Negative |
| SK-OV-3 | Ovarian | Negative |
| SW626 | Ovarian | Negative |
| MFE-296 | Endometrial | Negative |

ER: estrogen receptor;
PR: progesterone receptor

### Example 44: In Vitro Cell-Based Screening of Folate-XTEN-Drug Conjugates for Activity and Specificity

[0563] Folate-XTEN-drug conjugates are first subjected to an in vitro activity and selectivity screen. Each folate-XTEN-drug conjugate, its corresponding non-targeting XTEN-drug molecule and respective free drug control are tested in a CellTiter-Glo anti-proliferation assay against a panel of folate receptor positive and negative cell lines listed in Table 42. As culture media contain high folic acid content, cells will be grown and the assay performed in folic acid free-media containing 5-10% heat-inactivated fetal calf serum (FCS) at 37° C., in an atmosphere of 5% CO₂ (heat-inactivated FCS contains endogenous level of folic acid sufficient for folate receptor expressing cells to survive and proliferate). Appropriate assay conditions are established, including optimal cell density and incubation times, using folate-free media containing 5-10% FCS using the respective free drug as control. Folate-XTEN-drug conjugates are then tested as follows: cells in log-phase are collected, counted and plated at pre-determined cell density in 96-well microtiter assay plates. Adherent cells are allowed to attach to the plate by an overnight incubation at 37° C., 5% CO₂. Folate-XTEN-drug conjugates and corresponding controls are introduced using appropriate dose range dilutions, in duplicate, and the plates are incubated for an additional 2-5 days. After the appropriate incubation period, CellTiter-Glo reagent is added to each well and is mixed for 2 minutes on an orbital shaker. The plate is then centrifuged at 90×g and incubated at room temperature for an additional 10 minutes to stabilize the luminescent signal. Luminescence signals are then read on a luminometer and the IC₅₀ (half maximal inhibitory concentration) values are calculated with GraphPad Prism or equivalent software. Quantitative comparisons of the IC₅₀ values will enable ranking of the constructs' activity for inhibition of cell growth and selectivity against folate receptor positive versus negative cell lines. It is expected that the results would support the finding that the folate-XTEN-drug conjugates will show highly selective potent killing on folate receptor positive cells but not on folate receptor negative cells. This will be in contrast to the free drug moiety where no discrimination in cytotoxicity is expected between folate receptor positive and negative cell lines. The XTEN-drug control is expected to yield poor cytotoxic activity. Folate-XTEN-drug conjugates with favorable activity and cell line selectivity relative to controls will be further verified for folate receptor association by the addition of free competitive folic acid in the assay, demonstrating impaired folate-XTEN-drug cytotoxicity, further verifying the selective activity of the constructs.

TABLE 42
Folate receptor positive and negative cell lines

| Cell line | Tissue | Folate receptor status |
|---|---|---|
| KB | Nasopharyngeal | Positive |
| IGROV | Ovarian | Positive |
| SK-OV-3 | Ovarian | Positive |
| HeLa | Cervical | Positive |
| LoVo | Colorectal | Positive |
| SW620 | Colorectal | Positive |
| A549 | Lung | Negative |
| A375 | Multiple melanoma | Negative |
| LS-174T | Colorectal | Negative |
| SK-BR-3 | Breast | Negative |

### Example 45: In Vitro Serum Stability of LHRH-XTEN-Drug Conjugates

[0564] As a measure of stability, LHRH-XTEN-drug conjugates are incubated independently in normal human, cynomolgus monkey and mouse plasma at 37° C. for up to 2 weeks with aliquots removed at periodic intervals and stored at −80° C. till analysis. The stability of LHRH-XTEN-drug conjugate can be assessed either by the amount of free drug released or the integrity of the LHRH-XTEN-drug conjugate over time. Free drug is quantitated with RP-HPLC and/or LC-MS/MS whereas the amount of intact LHRH-XTEN-drug conjugate is determined using an XTEN/drug and/or an LHRH/drug ELISA.

[0565] For RP-HPLC analysis, plasma samples are treated with organic solvents such as acetonitrile or acetone to precipitate proteins. Soluble fractions are evaporated under vacuum, redissolved in loading solutions and analyzed by RP-HPLC. Analytes are detected by UV absorption at wavelengths specific for the particular drug, compared to known drug standards. For example, doxorubicin is detected at 480 nm. For LC-MS/MS analysis, plasma samples are treated with organic solvents such as acetonitrile or acetone to precipitate proteins. Soluble fractions are evaporated under vacuum, redissolved in loading solutions and analyzed by RP-HPLC. Analytes are detected and quantitated by triple quadrupole tandem mass spectrometry, compared to known drug standards. Parental ion-daughter ion pairs will be determined experimentally for each drug. For quantitative ELISA, optimal concentrations of antibodies for LHRH-XTEN-drug conjugate in the ELISAs are determined using criss-cross serial dilution analysis. An appropriate capture antibody recognizing one component of the conjugate is coated onto a 96-well microtiter plate by an overnight incubation at 4° C. The wells are blocked, washed and serum stability samples added to the wells, each at varying dilutions to allow optimal capture of the LHRH-XTEN-drug conjugate by the coated antibody. After washing, detection antibody recognizing another component of the conjugate is added and allowed to bind to the conjugate captured on the plate. Wells are then washed again and either streptavidin-horseradish peroxidase (complementary to biotinylated version of detection antibody) or an appropriate secondary antibody-horseradish peroxidase (complementary to non-biotinylated version of detection antibody) is then added. After appropriate incubation and a final wash step, tetramethylbenzidine (TMB) substrate is added and the plate read at 450 nM. Concentrations of intact conjugate are then calculated for each time point by comparing the colorimetric response to a calibration curve prepared with LHRH-XTEN-drug in the relevant plasma type. The ½ of the decay of the conjugate in human, cyno and mouse serum is then defined using linear regression analysis of the log concentrations vs. time.

### Example 46: In Vitro Serum Stability of Folate-XTEN-Drug Conjugates

[0566] As a measure of stability, folate-XTEN-drug conjugates are incubated independently in normal human, cynomolgus monkey and mouse plasma at 37° C. for up to 2 weeks with aliquots removed at periodic intervals and stored at −80° C. until analysis. The stability of folate-XTEN-drug conjugate is assessed either by the amount of free drug or the integrity of the folate-XTEN-drug conjugate over time. Free drug is quantitated with HPLC and/or LC-MS/MS whereas the amount of intact folate-XTEN-drug conjugate is determined using an XTEN/drug and/or folate/drug ELISA.

[0567] For RP-HPLC analysis, plasma samples are treated with organic solvents such as acetonitrile or acetone to precipitate proteins. Soluble fractions are evaporated under vacuum, redissolved in loading solutions and analyzed by RP-HPLC. Analytes are detected by UV absorption at wavelength specific for a particular drug, compared to known drug standards. For example, doxorubicin is detected at 480 nm. For LC-MS/MS analysis, plasma samples will be treated with organic solvents such as acetonitrile or acetone to precipitate proteins. Soluble fractions will be evaporated in vacuum, redissolved in loading solutions and analyzed by RP-HPLC. Analytes will be in-line detected and quantitated by triple quadrupole tandem mass spectrometry. Parental ion-daughter ion pairs will be determined experimentally for each drug. Calibration standards will be prepared by adding known amounts of free drug to corresponding plasma type and will be treated in parallel with experimental samples. For quantitative ELISA, optimal concentrations of antibodies for folate-XTEN-drug conjugate in the ELISAs is determined using criss-cross serial dilution analysis. An appropriate capture antibody recognizing one component of the conjugate is coated onto a 96-well microtiter plate by an overnight incubation at 4° C. The wells are blocked, washed and serum stability samples added to the wells, each at varying dilutions to allow optimal capture of the folate-XTEN-drug conjugate by the coated antibody. After washing, detection antibody recognizing another component of the conjugate is added and allowed to bind to the conjugate captured on the plate. Wells are then washed again and either streptavidin-horseradish peroxidase (complementary to biotinylated version of detection antibody) or an appropriate secondary antibody-horseradish peroxidase (complementary to non-biotinylated version of detection antibody) is then added. After appropriate incubation and a final wash step, tetramethylbenzidine (TMB) substrate is added and the plate is read at 450 nM. Concentrations of intact conjugate are then calculated for each time point by comparing the colorimetric response to a calibration curve prepared with folate-XTEN-drug in the relevant plasma type. The ½ of the decay of the conjugate in human, cyno and mouse serum is then defined using linear regression analysis of the log concentrations vs. time.

### Example 47: In Vivo and Ex Vivo Imaging of LHRH-XTEN-Cy5.5 Conjugate

[0568] A Cy5.5 fluorescent tagged LHRH-XTEN molecule is used as a surrogate to investigate the targeting and biodistribution efficiency of LHRH-XTEN-drug conjugates. Experiments will be carried out in nude mice bearing subcutaneous grown xenografts of LHRH receptor positive tumor cells using in vivo, followed by ex vivo, fluorescence imaging with IVIS 50 optical imaging system (Caliper Life Sciences, Hopkinton, MA). In brief, female nu/nu mice bearing LHRH receptor positive tumor cells are given a single intravenous injection of high or low dose LHRH-XTEN-Cy5.5 and corresponding doses of non-targeting Cy5.5 tagged XTEN control. Whole body scans are acquired pre-injection and then at approximately 8, 24, 48 and 72 hours post-injection on live anesthetized animals using the IVIS 50 optical imaging system. After measuring the distribution of fluorescence in the entire animal at the last time point of 72 h, tumor and healthy organs including liver, lung, heart, spleen and kidneys are excised and their fluorescence registered and processed by the imaging system. Cy5.5 excitation (615-665 nm) and emission (695-770 nm) filters are selected to match the fluorescence agents' wavelengths. Small and medium binning of the CCD chip is used and the exposure time optimized to obtain at least several thousand counts from the signals observable in each mouse in the image and to avoid saturation of the CCD chip. To normalize images for quantification, a background fluorescence image is acquired using background excitation and emission filters for the Cy5.5 spectral region. The intensity of fluorescence is expressed as different colors with blue color reflecting the lowest intensity and red being indicative of the highest intensity, and the resulting images are used to assess the uptake of the conjugates and controls.

### Example 48: In Vivo and Ex Vivo Imaging of Folate-XTEN-Cy5.5 Conjugates

[0569] A Cy5.5 fluorescent tagged folate-XTEN molecule is used as a surrogate to investigate the targeting and biodistribution efficiency of folate-XTEN-drug conjugates. Experiments will be carried out in nude mice bearing subcutaneous grown xenografts of folate receptor positive tumor cells using in vivo, followed by ex vivo, fluorescence imaging with IVIS 50 optical imaging system (Caliper Life Sciences, Hopkinton, MA). As culture media contain high folate content, folate receptor positive tumor cells to be transplanted onto these mice will be grown in folate-free cell culture media containing 5-10% heat-inactivated FCS with no antibiotics. Similarly, normal rodent chow contains a high concentration of folic acid; nude mice used in this study will be maintained on folate-free diet 2 weeks prior to tumor implantation and for the duration of the imaging analysis to reduce serum folate concentration.

[0570] In brief, female nu/nu mice bearing folate receptor positive tumor cells are given a single intravenous injection of high or low dose folate-XTEN-Cy5.5 and corresponding doses of non-targeting Cy5.5 tagged XTEN control. Whole body scans are acquired pre-injection and then at approximately 8, 24, 48 and 72 hours post-injection on live anesthetized animals using the IVIS 50 optical imaging system. After measuring the distribution of fluorescence in the entire animal at the last time point of 72 h, tumor and healthy organs including liver, lung, heart, spleen and kidneys are excised and their fluorescence registered and processed by the imaging system. Cy5.5 excitation (615-665 nm) and emission (695-770 nm) filters are selected to match the fluorescence agents' wavelengths. Small and medium binning of the CCD chip is used and the exposure time optimized to obtain at least several thousand counts from the signals that were observable in each mouse in the image and to avoid saturation of the CCD chip. To normalize images for quantification, a background fluorescence image is acquired using background excitation and emission filters for the Cy5.5 spectral region. The intensity of fluorescence is expressed as different colors with blue color reflecting the lowest intensity and red being indicative of the highest intensity, and the resulting images are used to assess the uptake of the conjugates and controls.

### Example 49: Pharmacokinetic Analysis of LHRH-XTEN-Drug Conjugates

[0571] The in vivo pharmacokinetics of LHRH-XTEN-drug constructs are assessed using standard methods for protein compositions using mice, rats, cynomolgus monkeys, and dogs. Compositions of LHRH-XTEN-drug constructs are provided in an aqueous buffer compatible with in vivo administration (for example: phosphate-buffered saline, Tris-buffered saline or Hepes-buffered saline). The compositions are administered at appropriate doses and via multiple routes: most preferably via intravenous or subcutaneous routes. Blood samples are collected at appropriate time points ranging from 0.08 to 504 hours, and processed into plasma. Plasma samples are analyzed for concentration of LHRH-XTEN-drug conjugates by one of a variety of methods, including ELISA, HPLC and/or LC-MS/MS. ELISA analysis are performed using a sandwich ELISA format that can recognize 2 components of the LHRH-XTEN-drug conjugate, for instance, XTEN/LHRH, XTEN/drug moiety, LHRH/drug moiety and/or XTEN/XTEN combinations. Typically antibody recognizing one component of the LHRH-XTEN-drug conjugate is coated onto wells of a %-well microtiter plate. The wells are blocked, washed and plasma samples are then added to the wells at varying dilutions to allow capture of the conjugate by the coated antibody. Wells are then washed extensively, and bound protein detected using either a biotinylated antibody or an appropriate secondary antibody against the second LHRH-XTEN-drug conjugate component. Wells are then washed again and streptavidin-horseradish peroxidase (complementary to the biotinylated detection antibody) or a secondary antibody-horseradish peroxidase (complementary to a non biotinylated detection antibody) is then added. After appropriate incubation and a final wash step, tetramethylbenzidine (TMB) substrate is added and the plate is read at 450 nM. Concentrations of conjugate are then calculated for each time point by comparing the colorimetric response to a LHRH-XTEN-drug calibration curve. Pharmacokinetic parameters are calculated using the WinNonLin software package.

[0572] For RP-HPLC analysis, plasma samples are treated with organic solvents such as acetonitrile or acetone to precipitate proteins. Soluble fractions are evaporated in vacuum, redissolved in loading solutions and analyzed by RP-HPLC. Analytes are detected by UV absorption at wavelength specific for a particular drug. For example, doxorubicin is detected at 480 nm. Calibration standards are prepared by adding known amounts of free drug to corresponding plasma type and are assayed in parallel with experimental samples.

[0573] For LC-MS/MS analysis, plasma samples are treated with organic solvents such as acetonitrile or acetone to precipitate proteins. Soluble fractions are evaporated under vacuum, redissolved in loading solutions and analyzed by RP-HPLC. Analytes are in-line detected and quantitated by triple quadrupole tandem mass spectrometry. Parental ion-daughter ion pairs are determined experimentally for each drug. Calibration standards are prepared by adding known amounts of free drug to corresponding plasma type and are assayed in parallel with experimental samples.

[0574] It is expected that the results would support the finding that addition of an XTEN to LHRH and drug moiety will greatly increase the terminal half-life and enhance the pharmacokinetic properties of targeting and drug moiety not linked to XTEN.

### Example 50: Pharmacokinetic Analysis of Folate-XTEN-Drug Conjugates

[0575] The in vivo pharmacokinetics of folate-XTEN-drug constructs are assessed using standard methods for protein compositions using mice, rats, cynomolgus monkeys, and dogs. As normal feed contains a high concentration of folic acid (approx. 6 mg/kg mouse chow), animals to be used in pharmacokinetic studies of folate conjugates will be maintained on folate-free diet for 2 weeks prior to study initiation and for the duration of the study. The compositions are administered at appropriate doses and via multiple routes: most preferably via intravenous or subcutaneous routes. Blood samples are collected at appropriate time points ranging from 0.08 to 504 hours, and processed into plasma. Plasma samples are analyzed for concentration of folate-XTEN-drug conjugates by a variety of methods including ELISA, HPLC and/or LC-MS/MS.

[0576] ELISA analysis are performed using a sandwich ELISA format that can recognize 2 components of the folate-XTEN-drug conjugate, for instance, XTEN/folate, XTEN/drug moiety, folate/drug moiety and/or XTEN/XTEN combinations. Typically antibody recognizing one component of the folate-XTEN-drug conjugate is coated onto wells of a 96-well microtiter plate. The wells are blocked, washed and plasma samples are then added to the wells at varying dilutions to allow capture of the conjugate by the coated antibody. Wells are then washed extensively, and bound protein detected using either a biotinylated antibody or an appropriate secondary antibody against the second folate-XTEN-drug conjugate component. Wells are then washed again and streptavidin-horseradish peroxidase (complementary to the biotinylated detection antibody) or a secondary antibody-horseradish peroxidase (complementary to a non biotinylated detection antibody) is then added. After appropriate incubation and a final wash step, tetramethylbenzidine (TMB) substrate is added and the plate is read at 450 nM. Concentrations of conjugate are then calculated for each time point by comparing the colorimetric response to a folate-XTEN-drug calibration curve. Pharmacokinetic parameters are calculated using the WinNonLin software package.

[0577] For RP-HPLC analysis, plasma samples are treated with organic solvents such as acetonitrile or acetone to precipitate proteins. Soluble fractions are evaporated in vacuum, redissolved in loading solutions and analyzed by RP-HPLC. Analytes are detected by UV absorption at wavelength specific for a particular drug. For example, doxorubicin is detected at 480 nm. Calibration standards are prepared by adding known amounts of free drug to corresponding plasma type and are assayed in parallel with experimental samples.

[0578] For LC-MS/MS analysis, plasma samples are treated with organic solvents such as acetonitrile or acetone to precipitate proteins. Soluble fractions are evaporated under vacuum, redissolved in loading solutions and analyzed by RP-HPLC. Analytes are in-line detected and quantitated by triple quadrupole tandem mass spectrometry. Parental ion-daughter ion pairs are determined experimentally for each drug. Calibration standards are prepared by adding known amounts of free drug to corresponding plasma type and are assayed in parallel with experimental samples.

[0579] It is expected that the results would support the finding that addition of an XTEN to folate and drug moiety will greatly increase the terminal half-life and enhance the pharmacokinetic properties of targeting and drug moiety not linked to XTEN.

### Example 51: In Vivo Efficacy and Toxicity Analysis of LHRH-XTEN-Drug Conjugates

[0580] LHRH-XTEN-drug conjugate is intended for targeted delivery of highly potent toxin to LHRH receptor positive tumor cells. As such, the in vivo pharmacologic activity of LHRH-XTEN-drug constructs can be assessed using human tumor cells expressing LHRH receptor transplanted into nude mice.

[0581] Prior to beginning the efficacy study, an initial assessment in nude mice is carried out to establish the maximum tolerated dose (MTD) of the LHRH-XTEN-drug candidates. The MTD, the highest dose that is tolerated by the animal for the study duration, will then be used to calculate the dose range for the efficacy and toxicity study in the standard xenograft model. Briefly, the MTD experiment is carried out with 5 mice per group evaluating the intravenous administration of LHRH-XTEN-drug conjugates at various dose level, interval and duration. The starting MTD dose and number of dose groups required is based on scientific literature, knowledge of the targeting LHRH moiety, the nature of the drug moiety conjugated, toxicological properties of closely related compounds, and data from the initial pharmacokinetic studies (see, above). Standard MTD parameters such as reduction in body weight, food and water consumption and signs of piloerection, hunched, behavior patterns, respiratory pattern, tremors, convulsions, prostration and self-mutilation are monitored on a daily basis. The highest dose of LHRH-XTEN-drug that does not cause unacceptable toxicity will be assigned as the MTD. The tumor xenograft study will include 3 to 4 dosing levels of LHRH-XTEN-drug conjugate and will depend on the results from the MTD study; with other parameters depending on the tumor cell line chosen. Table 42 provides examples of tumor lines that can be used in the xenograft study. Thus, an appropriate number of LHRH receptor positive cells from the relevant human tumor line are injected subcutaneously and allowed to form tumors, the size of which will be measured with calipers and the volume calculated as 0.5×L×W², where L=measurement of longest axis in millimeters and W=measurement of axis perpendicular to L in millimeters. Following randomization of mice containing tumor volume in the desired size range into groups of 8-10 animals, vehicle control, free drug control and LHRH-XTEN-drug conjugate is administered intravenously at the chosen doses and interval. Cessation or regression of tumor growth is determined by measuring the tumor size and volume at selected time points with calipers. Body weights and food consumption are measured every 1 to 2 days to assess gross toxicity. Survival of animals is monitored daily. At the end of the study, all animals are sacrificed and clinical pathology and histopathology on major organs is performed.

[0582] It is anticipated that the results would support the finding that the LHRH-XTEN-drug conjugate will produce a positive therapeutic index as exhibited by potent efficacy and low systemic toxicity. In contrast, the non-LHRH targeted free drug dosed at equimolar doses is expected to be less potent but highly more toxic. It is expected that the vehicle control will display uncontrolled tumor growth and severe toxicity.

### Example 52: In Vivo Efficacy and Toxicity Analysis of Folate-XTEN-Drug Conjugates

[0583] Folate-XTEN-drug conjugates are intended for targeted delivery of the toxin component to folate receptor positive tumor cells. The in vivo pharmacologic activity of folate-XTEN-drug constructs is assessed using human tumor cell expressing folate receptor xenograft onto nude mice. Prior to beginning the efficacy study, an initial assessment in nude mice is carried out to establish the maximum tolerated dose (MTD) of the folate-XTEN-drug candidates. The MTD, the highest dose that will be tolerated by the animal for the study duration, is then used to calculate the dose range for the efficacy and toxicity study in the standard xenograft model. As normal rodent chow contains a high concentration of folic acid (6 mg/kg chow), mice to be used in these studies are maintained on a folate-free diet for 2 weeks prior to study initiation and for the duration of the study. The MTD experiment is carried out with 5 mice per group evaluating the intravenous administration of folate-XTEN-drug conjugates at various dose level, interval and duration. The starting MTD dose and number of dose groups required is based on scientific literature, knowledge of the targeting folate moiety, the nature of the drug moiety conjugated, toxicological properties of closely related compounds, and data from the initial pharmacokinetic studies (see PK Example above). Standard MTD parameters such as reduction in body weight, food and water consumption and signs of piloerection, hunched, behavior patterns, respiratory pattern, tremors, convulsions, prostration and self-mutilation are carefully monitored on a daily basis. The highest dose of folate-XTEN-drug that does not cause unacceptable toxicity is assigned as the MTD.

[0584] The tumor xenograft study includes 3 to 4 dosing levels of folate-XTEN-drug, depending on the results from the MTD study, with other parameters depending on the tumor cell line chosen. Table 42 describes examples of tumor lines that can be used in the xenograft study. To reduce folate content, folate receptor positive tumor cells to be transplanted onto nude mice are grown in folate-free cell culture media containing 5-10% heat-inactivated fetal calf serum with no antibiotics. Similarly, to reduce serum folate concentration, mice used in the xenograft studies are maintained on folate-free diet 2 weeks prior to tumor implantation and for the duration of the study. An appropriate number of folate receptor positive cells from the relevant line are injected subcutaneously and allowed to form tumors, the size of which are measured with calipers and the volume calculated as 0.5×L×W², where L=measurement of longest axis in millimeters and W=measurement of axis perpendicular to L in millimeters. Following randomization of mice containing tumor volume in the desired size range into groups of 8-10 animals, vehicle control, free drug control and folate-XTEN-drug is administered intravenously at the chosen doses and intervals. Cessation or regression of tumor growth is determined through measuring the tumor size and volume at selected time points with calipers. Body weight and food consumption is measured every 1 to 2 days to assess gross toxicity. Survival of animals is monitored daily. At the end of study, all animals are sacrificed and major organs will be removed for clinical pathology and histopathology examination.

[0585] It is anticipated that the targeted chemotherapeutic folate-XTEN-drug conjugate will be more effective and less toxic than free cytotoxic drug alone on folate receptor positive tumors in the mouse model.

### Example 53: Human Clinical Trial Designs for Evaluating LHRH-XTEN-Drug Conjugates

[0586] Targeted chemotherapy is a modern approach aimed at increasing the efficacy of systemic chemotherapy and reducing side effects. LHRH is a peptide that functions in reproductive organs. Because its receptors are particularly concentrated on certain tumors but are not expressed in most normal tissue, the LHRH receptor is an ideal target for selective destruction of malignant tumors. Indeed, ˜52% of breast, ˜80% of ovarian and endometrial, and ˜85% of prostate cancer specimens is targetable via the LHRH receptor. Of note, LHRH-dependent therapies would be especially useful for triple negative breast tumors, which do not overexpress estrogen or progesterone receptors or HER2 and are therefore unsuitable for treatment with many available targeted drugs. Patients with advanced endometrial, ovarian, or prostate cancer often have particularly poor outcomes, as these malignancies can be prone to recurrence and/or resistant to current treatments. Fusion of a XTEN carrying 21 copy of LHRH to a XTEN bearing >3 drug molecules to create a targeted peptide-drug conjugate is expected to have vastly improved therapeutic index and half-life that will enable dosing at levels way below MTD, reduce dosing frequency and cost (reduced drug required per dose).

[0587] Clinical evaluation of a LHRH-XTEN-drug composition is conducted in patients suffering from advanced breast, endometrial, ovarian, and prostate or bladder cancers, with trials designed to confirm the efficacy and safety of the LHRH-XTEN-drug conjugate in humans. Such studies in patients would comprise three phases. First, a Phase I safety and pharmacokinetics study would be conducted to determine the maximum tolerated dose (MTD) and to characterize the dose-limiting toxicity, pharmacokinetics and preliminary pharmacodynamics in humans. These initial studies could be performed in patients with metastatic or unresectable cancers and for which standard curative or palliative measures could not be used or were no longer effective or tolerated, and LHRH receptor positive status in the patients would be an enrollment criteria. The scheme of the phase I study would be to use single escalating doses of LHRH-XTEN-drug conjugate and to measure the biochemical, PK, and clinical parameters, permitting the determination of the MTD and the threshold and maximum concentrations in dosage and in circulating drug that constitute the therapeutic window to be used in subsequent Phase II and Phase III trials, as well as defining potential toxicities and adverse events to be tracked in future studies.

[0588] Phase II clinical studies of human patients would be independently conducted in LHRH receptor positive advanced (stage 3 or 4) or recurrent breast, endometrial, ovarian, and prostate or bladder cancer patients. The trial would evaluate the efficacy and safety of LHRH-XTEN-drug conjugate alone and in combination with a current chemotherapy employed in the specific indication. Patients will receive intravenously administered LHRH-XTEN-drug clinical candidate at a dose level and regimen pre-determined in Phase I with or without the standard chemotherapeutic agent. A control arm comprising of the chemotherapeutic agent plus placebo would be included. The primary endpoint would be response rate as defined by the Response Evaluation Criteria in Solid Tumors (RECIST). Secondary endpoints will include safety and tolerability, time-to-progression and overall survival.

[0589] A phase III efficacy and safety study is conducted in LHRH receptor positive advanced (resistant, recurrent) breast, endometrial, ovarian, and prostate or bladder cancer patients to test ability to reach statistically significant clinical endpoints such as progression-free-survival as measured by RECIST. The trial will also be statistically powered for overall survival as a secondary endpoint with projected enrollment in excess of 400 patients. Efficacy outcomes are determined using standard statistical methods. Toxicity and adverse event markers are also followed in the study to verify that the compound is safe when used in the manner described.

### Example 54: Human Clinical Trial Designs for Evaluating Folate-XTEN-Drug Conjugates

[0590] Targeted chemotherapy is a modern approach aimed at increasing the efficacy of systemic chemotherapy and reducing its side effects. Folate, also known as folic acid, vitamin B₉, is a vital nutrient required by all living cells for nucleotide biosynthesis and function as cofactor in certain biological pathways. The folate receptor is a focus for the development of therapies to treat fast dividing malignancies; in particular ovarian cancer and non-small cell lung carcinoma. While folate receptor expression is negligible in normal ovary, ˜90% of epithelial ovarian cancers overexpress the folate receptor, as do many lung adenocarcinomas, thereby opening the possibility of directed therapies. Fusion of a XTEN carrying ≥1 copy of folate to a XTEN bearing ≥3 drug molecules to create a targeted peptide-drug conjugate is expected to improve the therapeutic index and the extended half-life will enable dosing at levels way below maximum tolerated dose (MTD), reduce dosing frequency and cost (reduced drug required per dose).

[0591] Clinical evaluation of folate-XTEN-drug composition is conducted in patients with relapsed or refractory advanced tumors or in patients suffering from platinum-resistant ovarian cancer and non-small cell lung carcinoma who have failed using other chemotherapies. Clinical trials are designed to determine the efficacy and advantages of the folate-XTEN-drug conjugate over standard therapies in humans. Such studies in patients would comprise three phases. First, a Phase I safety and pharmacokinetics study is conducted to determine the MTD and to characterize the dose-limiting toxicity, pharmacokinetics and preliminary pharmacodynamics in humans. These initial studies could be performed in patients with folate receptor positive status that have relapsed or have refractory advanced tumors and for which standard curative or palliative measures could not be used or were no longer effective or tolerated. The phase I study would use single escalating doses of folate-XTEN-drug conjugate and would measure biochemical, PK, and clinical parameters to permit the determination of the MTD and establish the threshold and maximum concentrations in dosage and in circulating drug that constitute the therapeutic window to be used in subsequent Phase II and Phase III trials as well as defining potential toxicities and adverse events to be tracked in future studies.

[0592] Phase II clinical studies of human patients would be independently conducted in folate receptor positive platinum-resistant ovarian cancer patient population, non-small cell lung carcinoma patients having failed numerous chemotherapies, and patients suffering from relapsed or refractory advanced tumors. The trials would evaluate the efficacy and safety of folate-XTEN-drug conjugate alone and in combination with a current chemotherapy employed in the specific indication. Patients will receive intravenously administered folate-XTEN-drug conjugate at a dose level and regimen determined in the Phase I study with or without the standard chemotherapy agent. A control arm comprising of the chemotherapy agent plus placebo would be included. The primary endpoint would be response rate as defined by the Response Evaluation Criteria in Solid Tumors (RECIST). Secondary endpoints will include safety and tolerability, time-to-progression and overall survival.

[0593] A phase III efficacy and safety study is conducted in folate-receptor positive platinum-resistant ovarian cancer patients, non-small cell lung carcinoma patients, or advanced tumor relapsed or refractory patients cancer patients to test ability to reach statistically significant clinical endpoints such as progression-free-survival as measured by RECIST. The trial will also be statistically powered for overall survival as a secondary endpoint with projected enrollment in excess of 400 patients. Efficacy outcomes are determined using standard statistical methods. Toxicity and adverse event markers are also followed in the study to verify that the compound is safe when used in the manner described.

### Example 55: Serum Stability of XTEN

[0594] A fusion protein containing XTEN_AE864 fused to the N-terminus of GFP was incubated in monkey plasma and rat kidney lysate for up to 7 days at 37° C. Samples were withdrawn at time 0, Day 1 and Day 7 and analyzed by SDS PAGE followed by detection using Western analysis and detection with antibodies against GFP as shown in FIG. 76. The sequence of XTEN_AE864 showed negligible signs of degradation over 7 days in plasma. However, XTEN_AE864 was rapidly degraded in rat kidney lysate over 3 days. The in vivo stability of the fusion protein was tested in plasma samples wherein the GFP_AE864 was immunoprecipitated and analyzed by SDS PAGE as described above. Samples that were withdrawn up to 7 days after injection showed very few signs of degradation. The results demonstrate the resistance of aaT-XTEN to degradation due to serum proteases; a factor in the enhancement of pharmacokinetic properties of the aaT-XTEN fusion proteins.

### Example 56: Characterization of Secondary Structure of XTEN Linked to Exendin-4

[0595] The XTEN_AE864-Ex4 was evaluated for degree of secondary structure by circular dichroism spectroscopy. CD spectroscopy was performed on a Jasco J-715 (Jasco Corporation, Tokyo, Japan) spectropolarimeter equipped with Jasco Peltier temperature controller (TPC-348WI). The concentration of protein was adjusted to 0.2 mg/mL in 20 mM sodium phosphate pH 7.0, 50 mM NaCl. The experiments were carried out using HELLMA quartz cells with an optical path-length of 0.1 cm. The CD spectra were acquired at 5°, 25°, 45°, and 65° C. and processed using the J-700 version 1.08.01 (Build 1) Jasco software for Windows. The samples were equilibrated at each temperature for 5 min before performing CD measurements. All spectra were recorded in duplicate from 300 nm to 185 nm using a bandwidth of 1 nm and a time constant of 2 sec, at a scan speed of 100 nm/min. The CD spectrum shown in FIG. 77 shows no evidence of stable secondary structure and is consistent with an unstructured polypeptide.

### Example 57: Increasing Solubility and Stability of a Peptide Payload by Linking to XTEN

[0596] In order to evaluate the ability of XTEN to enhance the physicochemical properties of solubility and stability, fusion proteins of glucagon plus shorter-length XTEN were prepared and evaluated. The test articles were prepared in Tris-buffered saline at neutral pH and characterization of the Gcg-XTEN solution was by reverse-phase HPLC and size exclusion chromatography to affirm that the protein was homogeneous and non-aggregated in solution. The data are presented in Table 43. For comparative purposes, the solubility limit of unmodified glucagon in the same buffer was measured at 60 μM (0.2 mg/mL), and the result demonstrate that for all lengths of XTEN added, a substantial increase in solubility was attained. Importantly, in most cases the glucagon-XTEN fusion proteins were prepared to achieve target concentrations and were not evaluated to determine the maximum solubility limits for the given construct. However, in the case of glucagon linked to the AF-144 XTEN, the limit of solubility was determined, with the result that a 60-fold increase in solubility was achieved, compared to glucagon not linked to XTEN. In addition, the glucagon-AF144 was evaluated for stability, and was found to be stable in liquid formulation for at least 6 months under refrigerated conditions and for approximately one month at 37° C. (data not shown).

[0597] The data support the conclusion that the linking of short-length XTEN polypeptides to a biologically active protein such as glucagon can markedly enhance the solubility properties of the protein by the resulting fusion protein, as well as confer stability at the higher protein concentrations.

TABLE 43
Solubility of Glucagon-XTEN constructs

| Test Article | Solubility | |
|---|---|---|
| Glucagon | 60 | μM |
| Glucagon-Y36 | >370 | μM |
| Glucagon-Y72 | >293 | μM |
| Glucagon-AF108 | >145 | μM |
| Glucagon-AF120 | >160 | μM |
| Glucagon-Y144 | >497 | μM |
| Glucagon-AE144 | >467 | μM |
| Glucagon-AF144 | >3600 | μM |
| Glucagon-Y288 | >163 | μM |

### Example 58: Analytical Size Exclusion Chromatography of XTEN Linked with Diverse Payloads

[0598] Size exclusion chromatography analyses were performed on fusion proteins containing various therapeutic proteins and unstructured recombinant proteins of increasing length. An exemplary assay used a TSKGel-G4000 SWXL (7.8 mm×30 cm) column in which 40 μg of purified glucagon fusion protein at a concentration of 1 mg/ml was separated at a flow rate of 0.6 ml/min in 20 mM phosphate pH 6.8, 114 mM NaCl. Chromatogram profiles were monitored using OD214 nm and OD280 nm. Column calibration for all assays were performed using a size exclusion calibration standard from BioRad; the markers include thyroglobulin (670 kDa), bovine gamma-globulin (158 kDa), chicken ovalbumin (44 kDa), equine myoglobin (17 kDa) and vitamin B12 (1.35 kDa). Representative chromatographic profiles of Glucagon-Y288, Glucagon-Y144, Glucagon-Y72, Glucagon-Y36 are shown as an overlay in FIG. 78. The data show that the molecular weight of each compound is proportional to the length of the attached XTEN sequence. However, the data also show that the apparent molecular weight of each construct is significantly larger than that expected for a globular protein (as shown by comparison to the standard proteins run in the same assay). Based on the SEC analyses for all constructs evaluated, the apparent molecular weights, the apparent molecular weight factor (expressed as the ratio of apparent molecular weight to the calculated molecular weight) and the hydrodynamic radius (R_{H} in nm) are shown in Table 44. The results indicate that incorporation of different XTENs of 576 amino acids or greater confers an apparent molecular weight for the fusion protein of approximately 339 kDa to 760, and that XTEN of 864 amino acids or greater confers an apparent molecular weight greater than approximately 800 kDA. The results of proportional increases in apparent molecular weight to actual molecular weight were consistent for fusion proteins created with XTEN from several different motif families; i.e., AD, AE, AF, AG, and AM, with increases of at least four-fold and ratios as high as about 17-fold. Additionally, the incorporation of XTEN fusion partners with 576 amino acids or more into fusion proteins with the various payloads (and 288 residues in the case of glucagon fused to Y288) resulted with a hydrodynamic radius of 7 nm or greater; well beyond the glomerular pore size of approximately 3-5 nm. Accordingly, it is expected that fusion proteins comprising growth and XTEN have reduced renal clearance, contributing to increased terminal half-life and improving the therapeutic or biologic effect relative to a corresponding un-fused biologic payload protein.

TABLE 44
SEC analysis of various polypeptides

| | | | | | Apparent | |
|---|---|---|---|---|---|---|
| | XTEN or | | Actual | Apparent | Molecular | |
| Construct | fusion | Therapeutic | MW | MW | Weight | R_{H} |
| Name | partner | Protein | (kDa) | (kDa) | Factor | (nm) |
| AC14 | Y288 | Glucagon | 28.7 | 370 | 12.9 | 7.0 |
| AC28 | Y144 | Glucagon | 16.1 | 117 | 7.3 | 5.0 |
| AC34 | Y72 | Glucagon | 9.9 | 58.6 | 5.9 | 3.8 |
| AC33 | Y36 | Glucagon | 6.8 | 29.4 | 4.3 | 2.6 |
| AC89 | AF120 | Glucagon | 14.1 | 76.4 | 5.4 | 4.3 |
| AC88 | AF108 | Glucagon | 13.1 | 61.2 | 4.7 | 3.9 |
| AC73 | AF144 | Glucagon | 16.3 | 95.2 | 5.8 | 4.7 |
| AC53 | AG576 | GFP | 74.9 | 339 | 4.5 | 7.0 |
| AC39 | AD576 | GFP | 76.4 | 546 | 7.1 | 7.7 |
| AC41 | AE576 | GFP | 80.4 | 760 | 9.5 | 8.3 |
| AC52 | AF576 | GFP | 78.3 | 526 | 6.7 | 7.6 |
| AC398 | AE288 | FVII | 76.3 | 650 | 8.5 | 8.2 |
| AC404 | AE864 | FVII | 129 | 1900 | 14.7 | 10.1 |
| AC85 | AE864 | Exendin-4 | 83.6 | 938 | 11.2 | 8.9 |
| AC114 | AM875 | Exendin-4 | 82.4 | 1344 | 16.3 | 9.4 |
| AC143 | AM875 | hGH | 100.6 | 846 | 8.4 | 8.7 |
| AC302 | AE912 + AE144 | hGH | 119.1 | 2,287 | 19.2 | 11.0 |
| AC227 | AM875 | IL-1ra | 95.4 | 1103 | 11.6 | 9.2 |
| AC228 | AM1318 | IL-1ra | 134.8 | 2286 | 17.0 | 10.5 |
| AC493 | AE864 | FIX | 127.7* | 3967 | 31.1 | 12.2 |
| AC616 | AE864 | GLP2-2G | 83.1 | 1427 | 17.2 | 10 |
| AC647 | AE864 | Ghrelin | 82.7 | 996 | 12 | 9.2 |
| AC659 | AE864 | C-peptide | 82.7 | 822 | 10 | 8.8 |
| AC663 | AE1296 | C-peptide | 122.2 | 2348 | 19.2 | 11.1 |
| AC434 | AE288 | aaT | 71.1 | 500 | 7.0 | 7.7 |
| AC435 | AE576 | aaT | 97.5 | 1,127 | 11.6 | 9.5 |
| AC345 | AM875 | aaT | 122.6 | 1,390 | 11.3 | 9.9 |
| AC450 | AE288 | aHer2_scFv | 56.2 | 312 | 5.5 | 6.7 |
| AC451 | AE576 | aHer2_scFv | 82.6 | 760 | 9.2 | 8.6 |
| AC452 | AE864 | aHer2_scFv | 109.1 | 1,390 | 12.7 | 9.9 |

*excluding glycosylation

### Example 59: Analysis of Sequences for Secondary Structure by Prediction Algorithms

[0599] Amino acid sequences can be assessed for secondary structure via certain computer programs or algorithms, such as the well-known Chou-Fasman algorithm (Chou, P. Y., et al. (1974) Biochemistry, 13: 222-45) and the Garnier-Osguthorpe-Robson, or “GOR” method (Gamier J, Gibrat J F, Robson B. (1996). GOR method for predicting protein secondary structure from amino acid sequence. Methods Enzymol 266:540-553). For a given sequence, the algorithms can predict whether there exists some or no secondary structure at all, expressed as total and/or percentage of residues of the sequence that form, for example, alpha-helices or beta-sheets or the percentage of residues of the sequence predicted to result in random coil formation.

[0600] Several representative sequences from XTEN “families” have been assessed using two algorithm tools for the Chou-Fasman and GOR methods to assess the degree of secondary structure in these sequences. The Chou-Fasman tool was provided by William R. Pearson and the University of Virginia, at the “Biosupport” internet site, URL located on the World Wide Web at.fasta.bioch.virginia.edu/fasta_www2/fasta_www.cgi?rm=misc1 as it existed on Jun. 19, 2009. The GOR tool was provided by Pole Informatique Lyonnais at the Network Protein Sequence Analysis internet site, URL located on the World Wide Web at .npsa-pbil.ibcp.fr/cgi-bin/secpred_gor4.pl as it existed on Jun. 19, 2008.

[0601] As a first step in the analyses, a single XTEN sequence was analyzed by the two algorithms. The AE864 composition is a XTEN with 864 amino acid residues created from multiple copies of four 12 amino acid sequence motifs consisting of the amino acids G, S, T, E, P, and A. The sequence motifs are characterized by the fact that there is limited repetitiveness within the motifs and within the overall sequence in that the sequence of any two consecutive amino acids is not repeated more than twice in any one 12 amino acid motif, and that no three contiguous amino acids of full-length the XTEN are identical. Successively longer portions of the AF 864 sequence from the N-terminus were analyzed by the Chou-Fasman and GOR algorithms (the latter requires a minimum length of 17 amino acids). The sequences were analyzed by entering the FASTA format sequences into the prediction tools and running the analysis. The results from the analyses are presented in Table 45.

[0602] The results indicate that, by the Chou-Fasman calculations, short XTEN of the AE and AG families, up to at least 288 amino acid residues, have no alpha-helices or beta sheets, but amounts of predicted percentage of random coil by the GOR algorithm vary from 78-99%. With increasing XTEN lengths of 504 residues to greater than 1300, the XTEN analyzed by the Chou-Fasman algorithm had predicted percentages of alpha-helices or beta sheets of 0 to about 2%, while the calculated percentages of random coil increased to from 94-99%. Those XTEN with alpha-helices or beta sheets were those sequences with one or more instances of three contiguous serine residues, which resulted in predicted beta-sheet formation. However, even these sequences still had approximately 99% random coil formation.

[0603] The analysis supports the conclusion that: 1) XTEN created from multiple sequence motifs of G, S, T, E, P, and A that have limited repetitiveness as to contiguous amino acids are predicted to have very low amounts of alpha-helices and beta-sheets; 2) that increasing the length of the XTEN does not appreciably increase the probability of alpha-helix or beta-sheet formation; and 3) that progressively increasing the length of the XTEN sequence by addition of non-repetitive 12-mers consisting of the amino acids G, S, T, E, P, and A results in increased percentage of random coil formation. Based on the numerous sequences evaluated by these methods, it is concluded that XTEN created from sequence motifs of G, S, T, E, P, and A that have limited repetitiveness (defined as no more than two identical contiguous amino acids in any one motif) are expected to have very limited secondary structure. With the exception of motifs containing three contiguous serines, generally any order or combination of sequence motifs from Table 1 can be used to create an XTEN polypeptide that will result in an XTEN sequence that is substantially devoid of secondary structure, and that the effects of three contiguous serines is ameliorated by increasing the length of the XTEN. Such sequences are expected to have the characteristics described in the XTEN-containing composition embodiments of the invention disclosed herein.

TABLE 45
CHOU-FASMAN and GOR prediction calculations of polypeptide sequences

| | | SEQ | | | |
|---|---|---|---|---|---|
| SEQ | | ID | No. | Chou-Fasman | GOR |
| NAME | Sequence | NO: | Residues | Calculation | Calculation |
| AE36: | GSPAGSPTSTEEGTSESATPESGPGT | 1103 | 36 | Residue totals: H: 0 | 94.44% |
| LCW0402_ | STEPSEGSAP | | | E: 0 | |
| 002 | | | | percent: H: 0.0 E: | |
| | | | | 0.0 | |
| AE36: | GTSTEPSEGSAPGTSTEPSEGSAPGT | 1104 | 36 | Residue totals: H: 0 | 94.44% |
| LCW0402_ | STEPSEGSAP | | | E: 0 | |
| 003 | | | | percent: H: 0.0 E: | |
| | | | | 0.0 | |
| AG36: | GASPGTSSTGSPGTPGSGTASSSPGS | 1105 | 36 | Residue totals: H: 0 | 77.78% |
| LCW0404_ | STPSGATGSP | | | E: 0 | |
| 001 | | | | percent: H: 0.0 E: | |
| | | | | 0.0 | |
| AG36: | GSSTPSGATGSPGSSPSASTGTGPGS | 1106 | 36 | Residue totals: H: 0 | 83.33% |
| LCW0404_ | STPSGATGSP | | | E: 0 | |
| 003 | | | | percent: H: 0.0 E: | |
| | | | | 0.0 | |
| AE42_1 | TEPSEGSAPGSPAGSPTSTEEGTSES | 1107 | 42 | Residue totals: H: 0 | 90.48% |
| | ATPESGPGSEPATSGS | | | E: 0 | |
| | | | | percent: H: 0.0 E: | |
| | | | | 0.0 | |
| AE42_1 | TEPSEGSAPGSPAGSPTSTEEGTSES | 1108 | 42 | Residue totals: H: 0 | 90.48% |
| | ATPESGPGSEPATSGS | | | E: 0 | |
| | | | | percent: H: 0.0 E: | |
| | | | | 0.0 | |
| AG42_1 | GAPSPSASTGTGPGTPGSGTASSSPG | 1109 | 42 | Residue totals: H: 0 | 88.10% |
| | SSTPSGATGSPGPSGP | | | E: 0 | |
| | | | | percent: H: 0.0 E: | |
| | | | | 0.0 | |
| AG42_2 | GPGTPGSGTASSSPGSSTPSGATGSP | 1110 | 42 | Residue totals: H: 0 | 88.10% |
| | GSSPSASTGTGPGASP | | | E: 0 | |
| | | | | percent: H: 0.0 E: | |
| | | | | 0.0 | |
| AE144 | GSEPATSGSETPGTSESATPESGPGS | 1111 | 144 | Residue totals: H: 0 | 98.61% |
| | EPATSGSETPGSPAGSPTSTEEGTST | | | E: 0 | |
| | EPSEGSAPGSEPATSGSETPGSEPAT | | | percent: H: 0.0 E: | |
| | SGSETPGSEPATSGSETPGTSTEPSE | | | 0.0 | |
| | GSAPGTSESATPESGPGSEPATSGSE | | | | |
| | TPGTSTEPSEGSAP | | | | |
| AG144_1 | PGSSPSASTGTGPGSSPSASTGTGPG | 1112 | 144 | Residue totals: H: 0 | 91.67% |
| | TPGSGTASSSPGSSTPSGATGSPGSS | | | E: 0 | |
| | PSASTGTGPGASPGTSSTGSPGTPGS | | | percent: H: 0.0 E: | |
| | GTASSSPGSSTPSGATGSPGTPGSGT | | | 0.0 | |
| | ASSSPGASPGTSSTGSPGASPGTSST | | | | |
| | GSPGTPGSGTASSS | | | | |
| AE288 | GTSESATPESGPGSEPATSGSETPGT | 1113 | 288 | Residue totals: H: 0 | 99.31% |
| | SESATPESGPGSEPATSGSETPGTSE | | | E: 0 | |
| | SATPESGPGTSTEPSEGSAPGSPAGS | | | percent: H: 0.0 E: | |
| | PTSTEEGTSESATPESGPGSEPATSG | | | 0.0 | |
| | SETPGTSESATPESGPGSPAGSPTST | | | | |
| | EEGSPAGSPTSTEEGTSTEPSEGSAP | | | | |
| | GTSESATPESGPGTSESATPESGPGT | | | | |
| | SESATPESGPGSEPATSGSETPGSEP | | | | |
| | ATSGSETPGSPAGSPTSTEEGTSTEP | | | | |
| | SEGSAPGTSTEPSEGSAPGSEPATSG | | | | |
| | SETPGTSESATPESGPGTSTEPSEGS | | | | |
| | AP | | | | |
| AG288_2 | GSSPSASTGTGPGSSPSASTGTGPGT | 1114 | 288 | Residue totals: H: 0 | 92.71 |
| | PGSGTASSSPGSSTPSGATGSPGSSP | | | E: 0 | |
| | SASTGTGPGASPGTSSTGSPGTPGSG | | | percent: H: 0.0 E: | |
| | TASSSPGSSTPSGATGSPGTPGSGTA | | | 0.0 | |
| | SSSPGASPGTSSTGSPGASPGTSSTG | | | | |
| | SPGTPGSGTASSSPGSSTPSGATGSP | | | | |
| | GASPGTSSTGSPGTPGSGTASSSPGS | | | | |
| | STPSGATGSPGSSPSASTGTGPGSSP | | | | |
| | SASTGTGPGSSTPSGATGSPGSSTPS | | | | |
| | GATGSPGASPGTSSTGSPGASPGTSS | | | | |
| | TGSPGASPGTSSTGSPGTPGSGTASS | | | | |
| | SP | | | | |
| AF504 | GASPGTSSTGSPGSSPSASTGTGPGS | 1115 | 504 | Residue totals: H: 0 | 94.44% |
| | SPSASTGTGPGTPGSGTASSSPGSST | | | E: 0 | |
| | PSGATGSPGSNPSASTGTGPGASPG | | | percent: H: 0.0 E: | |
| | TSSTGSPGTPGSGTASSSPGSSTPSG | | | 0.0 | |
| | ATGSPGTPGSGTASSSPGASPGTSST | | | | |
| | GSPGASPGTSSTGSPGTPGSGTASSS | | | | |
| | PGSSTPSGATGSPGASPGTSSTGSPG | | | | |
| | TPGSGTASSSPGSSTPSGATGSPGSN | | | | |
| | PSASTGTGPGSSPSASTGTGPGSSTP | | | | |
| | SGATGSPGSSTPSGATGSPGASPGTS | | | | |
| | STGSPGASPGTSSTGSPGASPGTSST | | | | |
| | GSPGTPGSGTASSSPGASPGTSSTGS | | | | |
| | PGASPGTSSTGSPGASPGTSSTGSPG | | | | |
| | SSPSASTGTGPGTPGSGTASSSPGAS | | | | |
| | PGTSSTGSPGASPGTSSTGSPGASPG | | | | |
| | TSSTGSPGSSTPSGATGSPGSSTPSG | | | | |
| | ATGSPGASPGTSSTGSPGTPGSGTAS | | | | |
| | SSPGSSTPSGATGSPGSSTPSGATGS | | | | |
| | PGSSTPSGATGSPGSSPSASTGTGPG | | | | |
| | ASPGTSSTGSP | | | | |
| AD 576 | GSSESGSSEGGPGSGGEPSESGSSGS | 1116 | 576 | Residue totals: H: 7 | 99.65% |
| | SESGSSEGGPGSSESGSSEGGPGSSE | | | E: 0 percent: H: 1.2 | |
| | SGSSEGGPGSSESGSSEGGPGSSESG | | | E: 0.0 | |
| | SSEGGPGESPGGSSGSESGSEGSSGP | | | | |
| | GESSGSSESGSSEGGPGSSESGSSEG | | | | |
| | GPGSSESGSSEGGPGSGGEPSESGSS | | | | |
| | GESPGGSSGSESGESPGGSSGSESGS | | | | |
| | GGEPSESGSSGSSESGSSEGGPGSGG | | | | |
| | EPSESGSSGSGGEPSESGSSGSEGSS | | | | |
| | GPGESSGESPGGSSGSESGSGGEPSE | | | | |
| | SGSSGSGGEPSESGSSGSGGEPSESG | | | | |
| | SSGSSESGSSEGGPGESPGGSSGSES | | | | |
| | GESPGGSSGSESGESPGGSSGSESGE | | | | |
| | SPGGSSGSESGESPGGSSGSESGSSE | | | | |
| | SGSSEGGPGSGGEPSESGSSGSEGSS | | | | |
| | GPGESSGSSESGSSEGGPGSGGEPSE | | | | |
| | SGSSGSSESGSSEGGPGSGGEPSESG | | | | |
| | SSGESPGGSSGSESGESPGGSSGSES | | | | |
| | GSSESGSSEGGPGSGGEPSESGSSGS | | | | |
| | SESGSSEGGPGSGGEPSESGSSGSGG | | | | |
| | EPSESGSSGESPGGSSGSESGSEGSS | | | | |
| | GPGESSGSSESGSSEGGPGSEGSSGP | | | | |
| | GESS | | | | |
| AE576 | GSPAGSPTSTEEGTSESATPESGPGT | 1117 | 576 | Residue totals: H: 2 | 99.65% |
| | STEPSEGSAPGSPAGSPTSTEEGTST | | | E: 0 | |
| | EPSEGSAPGTSTEPSEGSAPGTSESA | | | percent: H: 0.4 E: | |
| | TPESGPGSEPATSGSETPGSEPATSG | | | 0.0 | |
| | SETPGSPAGSPTSTEEGTSESATPES | | | | |
| | GPGTSTEPSEGSAPGTSTEPSEGSAP | | | | |
| | GSPAGSPTSTEEGTSTEPSEGSAPGT | | | | |
| | STEPSEGSAPGTSESATPESGPGTST | | | | |
| | EPSEGSAPGTSESATPESGPGSEPAT | | | | |
| | SGSETPGTSTEPSEGSAPGTSTEPSE | | | | |
| | GSAPGTSESATPESGPGTSESATPES | | | | |
| | GPGSPAGSPTSTEEGTSESATPESGP | | | | |
| | GSEPATSGSETPGTSESATPESGPGT | | | | |
| | STEPSEGSAPGTSTEPSEGSAPGTST | | | | |
| | EPSEGSAPGTSTEPSEGSAPGTSTEP | | | | |
| | SEGSAPGTSTEPSEGSAPGSPAGSPT | | | | |
| | STEEGTSTEPSEGSAPGTSESATPES | | | | |
| | GPGSEPATSGSETPGTSESATPESGP | | | | |
| | GSEPATSGSETPGTSESATPESGPGT | | | | |
| | STEPSEGSAPGTSESATPESGPGSPA | | | | |
| | GSPTSTEEGSPAGSPTSTEEGSPAGS | | | | |
| | PTSTEEGTSESATPESGPGTSTEPSE | | | | |
| | GSAP | | | | |
| AG576 | PGTPGSGTASSSPGSSTPSGATGSPG | 1118 | 576 | Residue totals: H: 0 | 99.31% |
| | SSPSASTGTGPGSSPSASTGTGPGSS | | | E: 3 | |
| | TPSGATGSPGSSTPSGATGSPGASPG | | | percent: H: 0.4 E: | |
| | TSSTGSPGASPGTSSTGSPGASPGTS | | | 0.5 | |
| | STGSPGTPGSGTASSSPGASPGTSST | | | | |
| | GSPGASPGTSSTGSPGASPGTSSTGS | | | | |
| | PGSSPSASTGTGPGTPGSGTASSSPG | | | | |
| | ASPGTSSTGSPGASPGTSSTGSPGAS | | | | |
| | PGTSSTGSPGSSTPSGATGSPGSSTPS | | | | |
| | GATGSPGASPGTSSTGSPGTPGSGT | | | | |
| | ASSSPGSSTPSGATGSPGSSTPSGAT | | | | |
| | GSPGSSTPSGATGSPGSSPSASTGTG | | | | |
| | PGASPGTSSTGSPGASPGTSSTGSPG | | | | |
| | TPGSGTASSSPGASPGTSSTGSPGAS | | | | |
| | PGTSSTGSPGASPGTSSTGSPGASPG | | | | |
| | TSSTGSPGTPGSGTASSSPGSSTPSG | | | | |
| | ATGSPGTPGSGTASSSPGSSTPSGAT | | | | |
| | GSPGTPGSGTASSSPGSSTPSGATGS | | | | |
| | PGSSTPSGATGSPGSSPSASTGTGPG | | | | |
| | SSPSASTGTGPGASPGTSSTGSPGTP | | | | |
| | GSGTASSSPGSSTPSGATGSPGSSPS | | | | |
| | ASTGTGPGSSPSASTGTGPGASPGTS | | | | |
| | STGS | | | | |
| AF540 | GSTSSTAESPGPGSTSSTAESPGPGS | 1119 | 540 | Residue totals: H: 2 | 99.65 |
| | TSESPSGTAPGSTSSTAESPGPGSTSS | | | E: 0 percent: H: 0.4 | |
| | TAESPGPGTSTPESGSASPGSTSESPS | | | E: 0.0 | |
| | GTAPGTSPSGESSTAPGSTSESPSGT | | | | |
| | APGSTSESPSGTAPGTSPSGESSTAP | | | | |
| | GSTSESPSGTAPGSTSESPSGTAPGT | | | | |
| | SPSGESSTAPGSTSESPSGTAPGSTSE | | | | |
| | SPSGTAPGSTSESPSGTAPGTSTPES | | | | |
| | GSASPGSTSESPSGTAPGTSTPESGS | | | | |
| | ASPGSTSSTAESPGPGSTSSTAESPG | | | | |
| | PGTSTPESGSASPGTSTPESGSASPG | | | | |
| | STSESPSGTAPGTSTPESGSASPGTST | | | | |
| | PESGSASPGSTSESPSGTAPGSTSESP | | | | |
| | SGTAPGSTSESPSGTAPGSTSSTAES | | | | |
| | PGPGTSTPESGSASPGTSTPESGSAS | | | | |
| | PGSTSESPSGTAPGSTSESPSGTAPG | | | | |
| | TSTPESGSASPGSTSESPSGTAPGSTS | | | | |
| | ESPSGTAPGTSTPESGSASPGTSPSG | | | | |
| | ESSTAPGSTSSTAESPGPGTSPSGESS | | | | |
| | TAPGSTSSTAESPGPGTSTPESGSAS | | | | |
| | PGSTSESPSGTAP | | | | |
| AD836 | GSSESGSSEGGPGSSESGSSEGGPGE | 1120 | 836 | Residue totals: H: 0 | 98.44% |
| | SPGGSSGSESGSGGEPSESGSSGESP | | | E: 0 | |
| | GGSSGSESGESPGGSSGSESGSSESG | | | percent: H: 0.0 E: | |
| | SSEGGPGSSESGSSEGGPGSSESGSS | | | 0.0 | |
| | EGGPGESPGGSSGSESGESPGGSSGS | | | | |
| | ESGESPGGSSGSESGSSESGSSEGGP | | | | |
| | GSSESGSSEGGPGSSESGSSEGGPGS | | | | |
| | SESGSSEGGPGSSESGSSEGGPGSSE | | | | |
| | SGSSEGGPGSGGEPSESGSSGESPGG | | | | |
| | SSGSESGESPGGSSGSESGSGGEPSE | | | | |
| | SGSSGSEGSSGPGESSGSSESGSSEG | | | | |
| | GPGSGGEPSESGSSGSEGSSGPGESS | | | | |
| | GSSESGSSEGGPGSGGEPSESGSSGE | | | | |
| | SPGGSSGSESGSGGEPSESGSSGSGG | | | | |
| | EPSESGSSGSSESGSSEGGPGSGGEP | | | | |
| | SESGSSGSGGEPSESGSSGSEGSSGP | | | | |
| | GESSGESPGGSSGSESGSEGSSGPGE | | | | |
| | SSGSEGSSGPGESSGSGGEPSESGSS | | | | |
| | GSSESGSSEGGPGSSESGSSEGGPGE | | | | |
| | SPGGSSGSESGSGGEPSESGSSGSEG | | | | |
| | SSGPGESSGESPGGSSGSESGSEGSS | | | | |
| | GPGSSESGSSEGGPGSGGEPSESGSS | | | | |
| | GSEGSSGPGESSGSEGSSGPGESSGS | | | | |
| | EGSSGPGESSGSGGEPSESGSSGSGG | | | | |
| | EPSESGSSGESPGGSSGSESGESPGG | | | | |
| | SSGSESGSGGEPSESGSSGSEGSSGP | | | | |
| | GESSGESPGGSSGSESGSSESGSSEG | | | | |
| | GPGSSESGSSEGGPGSSESGSSEGGP | | | | |
| | GSGGEPSESGSSGSSESGSSEGGPGE | | | | |
| | SPGGSSGSESGSGGEPSESGSSGSSE | | | | |
| | SGSSEGGPGESPGGSSGSESGSGGEP | | | | |
| | SESGSSGESPGGSSGSESGSGGEPSE | | | | |
| | SGSS | | | | |
| AE864 | GSPAGSPTSTEEGTSESATPESGPGT | 1121 | 864 | Residue totals: H: 2 | 99.77% |
| | STEPSEGSAPGSPAGSPTSTEEGTST | | | E: 3 | |
| | EPSEGSAPGTSTEPSEGSAPGTSESA | | | percent: H: 0.2 E: | |
| | TPESGPGSEPATSGSETPGSEPATSG | | | 0.4 | |
| | SETPGSPAGSPTSTEEGTSESATPES | | | | |
| | GPGTSTEPSEGSAPGTSTEPSEGSAP | | | | |
| | GSPAGSPTSTEEGTSTEPSEGSAPGT | | | | |
| | STEPSEGSAPGTSESATPESGPGTST | | | | |
| | EPSEGSAPGTSESATPESGPGSEPAT | | | | |
| | SGSETPGTSTEPSEGSAPGTSTEPSE | | | | |
| | GSAPGTSESATPESGPGTSESATPES | | | | |
| | GPGSPAGSPTSTEEGTSESATPESGP | | | | |
| | GSEPATSGSETPGTSESATPESGPGT | | | | |
| | STEPSEGSAPGTSTEPSEGSAPGTST | | | | |
| | EPSEGSAPGTSTEPSEGSAPGTSTEP | | | | |
| | SEGSAPGTSTEPSEGSAPGSPAGSPT | | | | |
| | STEEGTSTEPSEGSAPGTSESATPES | | | | |
| | GPGSEPATSGSETPGTSESATPESGP | | | | |
| | GSEPATSGSETPGTSESATPESGPGT | | | | |
| | STEPSEGSAPGTSESATPESGPGSPA | | | | |
| | GSPTSTEEGSPAGSPTSTEEGSPAGS | | | | |
| | PTSTEEGTSESATPESGPGTSTEPSE | | | | |
| | GSAPGTSESATPESGPGSEPATSGSE | | | | |
| | TPGTSESATPESGPGSEPATSGSETP | | | | |
| | GTSESATPESGPGTSTEPSEGSAPGS | | | | |
| | PAGSPTSTEEGTSESATPESGPGSEP | | | | |
| | ATSGSETPGTSESATPESGPGSPAGS | | | | |
| | PTSTEEGSPAGSPTSTEEGTSTEPSE | | | | |
| | GSAPGTSESATPESGPGTSESATPES | | | | |
| | GPGTSESATPESGPGSEPATSGSETP | | | | |
| | GSEPATSGSETPGSPAGSPTSTEEGT | | | | |
| | STEPSEGSAPGTSTEPSEGSAPGSEP | | | | |
| | ATSGSETPGTSESATPESGPGTSTEP | | | | |
| | SEGSAP | | | | |
| AF864 | GSTSESPSGTAPGTSPSGESSTAPGS | 1122 | 875 | Residue totals: H: 2 | 95.20% |
| | TSESPSGTAPGSTSESPSGTAPGTSTP | | | E: 0 percent: H: 0.2 | |
| | ESGSASPGTSTPESGSASPGSTSESPS | | | E: 0.0 | |
| | GTAPGSTSESPSGTAPGTSPSGESST | | | | |
| | APGSTSESPSGTAPGTSPSGESSTAP | | | | |
| | GTSPSGESSTAPGSTSSTAESPGPGT | | | | |
| | SPSGESSTAPGTSPSGESSTAPGSTSS | | | | |
| | TAESPGPGTSTPESGSASPGTSTPES | | | | |
| | GSASPGSTSESPSGTAPGSTSESPSG | | | | |
| | TAPGTSTPESGSASPGSTSSTAESPG | | | | |
| | PGTSTPESGSASPGSTSESPSGTAPG | | | | |
| | TSPSGESSTAPGSTSSTAESPGPGTSP | | | | |
| | SGESSTAPGTSTPESGSASPGSTSST | | | | |
| | AESPGPGSTSSTAESPGPGSTSSTAE | | | | |
| | SPGPGSTSSTAESPGPGTSPSGESST | | | | |
| | APGSTSESPSGTAPGSTSESPSGTAP | | | | |
| | GTSTPESGPXXXGASASGAPSTXXX | | | | |
| | XSESPSGTAPGSTSESPSGTAPGSTS | | | | |
| | ESPSGTAPGSTSESPSGTAPGSTSESP | | | | |
| | SGTAPGSTSESPSGTAPGTSTPESGS | | | | |
| | ASPGTSPSGESSTAPGTSPSGESSTA | | | | |
| | PGSTSSTAESPGPGTSPSGESSTAPG | | | | |
| | TSTPESGSASPGSTSESPSGTAPGSTS | | | | |
| | ESPSGTAPGTSPSGESSTAPGSTSESP | | | | |
| | SGTAPGTSTPESGSASPGTSTPESGS | | | | |
| | ASPGSTSESPSGTAPGTSTPESGSAS | | | | |
| | PGSTSSTAESPGPGSTSESPSGTAPG | | | | |
| | STSESPSGTAPGTSPSGESSTAPGSTS | | | | |
| | STAESPGPGTSPSGESSTAPGTSTPES | | | | |
| | GSASPGTSPSGESSTAPGTSPSGESS | | | | |
| | TAPGTSPSGESSTAPGSTSSTAESPG | | | | |
| | PGSTSSTAESPGPGTSPSGESSTAPG | | | | |
| | SSPSASTGTGPGSSTPSGATGSPGSS | | | | |
| | TPSGATGSP | | | | |
| AG864 | GASPGTSSTGSPGSSPSASTGTGPGS | 1123 | 864 | Residue totals: H: 0 | 94.91% |
| | SPSASTGTGPGTPGSGTASSSPGSST | | | E: 0 | |
| | PSGATGSPGSSPSASTGTGPGASPGT | | | percent: H: 0.0 E: | |
| | SSTGSPGTPGSGTASSSPGSSTPSGA | | | 0.0 | |
| | TGSPGTPGSGTASSSPGASPGTSSTG | | | | |
| | SPGASPGTSSTGSPGTPGSGTASSSP | | | | |
| | GSSTPSGATGSPGASPGTSSTGSPGT | | | | |
| | PGSGTASSSPGSSTPSGATGSPGSSP | | | | |
| | SASTGTGPGSSPSASTGTGPGSSTPS | | | | |
| | GATGSPGSSTPSGATGSPGASPGTSS | | | | |
| | TGSPGASPGTSSTGSPGASPGTSSTG | | | | |
| | SPGTPGSGTASSSPGASPGTSSTGSP | | | | |
| | GASPGTSSTGSPGASPGTSSTGSPGS | | | | |
| | SPSASTGTGPGTPGSGTASSSPGASP | | | | |
| | GTSSTGSPGASPGTSSTGSPGASPGT | | | | |
| | SSTGSPGSSTPSGATGSPGSSTPSGA | | | | |
| | TGSPGASPGTSSTGSPGTPGSGTASS | | | | |
| | SPGSSTPSGATGSPGSSTPSGATGSP | | | | |
| | GSSTPSGATGSPGSSPSASTGTGPGA | | | | |
| | SPGTSSTGSPGASPGTSSTGSPGTPG | | | | |
| | SGTASSSPGASPGTSSTGSPGASPGT | | | | |
| | SSTGSPGASPGTSSTGSPGASPGTSS | | | | |
| | TGSPGTPGSGTASSSPGSSTPSGATG | | | | |
| | SPGTPGSGTASSSPGSSTPSGATGSP | | | | |
| | GTPGSGTASSSPGSSTPSGATGSPGS | | | | |
| | STPSGATGSPGSSPSASTGTGPGSSP | | | | |
| | SASTGTGPGASPGTSSTGSPGTPGSG | | | | |
| | TASSSPGSSTPSGATGSPGSSPSAST | | | | |
| | GTGPGSSPSASTGTGPGASPGTSSTG | | | | |
| | SPGASPGTSSTGSPGSSTPSGATGSP | | | | |
| | GSSPSASTGTGPGASPGTSSTGSPGS | | | | |
| | SPSASTGTGPGTPGSGTASSSPGSST | | | | |
| | PSGATGSPGSSTPSGATGSPGASPGT | | | | |
| | SSTGSP | | | | |
| AM875 | GTSTEPSEGSAPGSEPATSGSETPGS | 1124 | 875 | Residue totals: H: 7 | 98.63% |
| | PAGSPTSTEEGSTSSTAESPGPGTST | | | E: 3 | |
| | PESGSASPGSTSESPSGTAPGSTSESP | | | percent: H: 0.8 E: | |
| | SGTAPGTSTPESGSASPGTSTPESGS | | | 0.3 | |
| | ASPGSEPATSGSETPGTSESATPESG | | | | |
| | PGSPAGSPTSTEEGTSTEPSEGSAPG | | | | |
| | TSESATPESGPGTSTEPSEGSAPGTS | | | | |
| | TEPSEGSAPGSPAGSPTSTEEGTSTE | | | | |
| | PSEGSAPGTSTEPSEGSAPGTSESAT | | | | |
| | PESGPGTSESATPESGPGTSTEPSEG | | | | |
| | SAPGTSTEPSEGSAPGTSESATPESG | | | | |
| | PGTSTEPSEGSAPGSEPATSGSETPG | | | | |
| | SPAGSPTSTEEGSSTPSGATGSPGTP | | | | |
| | GSGTASSSPGSSTPSGATGSPGTSTE | | | | |
| | PSEGSAPGTSTEPSEGSAPGSEPATS | | | | |
| | GSETPGSPAGSPTSTEEGSPAGSPTS | | | | |
| | TEEGTSTEPSEGSAPGASASGAPSTG | | | | |
| | GTSESATPESGPGSPAGSPTSTEEGS | | | | |
| | PAGSPTSTEEGSTSSTAESPGPGSTS | | | | |
| | ESPSGTAPGTSPSGESSTAPGTPGSG | | | | |
| | TASSSPGSSTPSGATGSPGSSPSAST | | | | |
| | GTGPGSEPATSGSETPGTSESATPES | | | | |
| | GPGSEPATSGSETPGSTSSTAESPGP | | | | |
| | GSTSSTAESPGPGTSPSGESSTAPGS | | | | |
| | EPATSGSETPGSEPATSGSETPGTST | | | | |
| | EPSEGSAPGSTSSTAESPGPGTSTPES | | | | |
| | GSASPGSTSESPSGTAPGTSTEPSEG | | | | |
| | SAPGTSTEPSEGSAPGTSTEPSEGSA | | | | |
| | PGSSTPSGATGSPGSSPSASTGTGPG | | | | |
| | ASPGTSSTGSPGSEPATSGSETPGTS | | | | |
| | ESATPESGPGSPAGSPTSTEEGSSTPS | | | | |
| | GATGSPGSSPSASTGTGPGASPGTSS | | | | |
| | TGSPGTSESATPESGPGTSTEPSEGS | | | | |
| | APGTSTEPSEGSAP | | | | |
| AM1318 | GTSTEPSEGSAPGSEPATSGSETPGS | 1125 | 1318 | Residue totals: H: 7 | 99.17% |
| | PAGSPTSTEEGSTSSTAESPGPGTST | | | E: 0 | |
| | PESGSASPGSTSESPSGTAPGSTSESP | | | percent: H: 0.7 E: | |
| | SGTAPGTSTPESGSASPGTSTPESGS | | | 0.0 | |
| | ASPGSEPATSGSETPGTSESATPESG | | | | |
| | PGSPAGSPTSTEEGTSTEPSEGSAPG | | | | |
| | TSESATPESGPGTSTEPSEGSAPGTS | | | | |
| | TEPSEGSAPGSPAGSPTSTEEGTSTE | | | | |
| | PSEGSAPGTSTEPSEGSAPGTSESAT | | | | |
| | PESGPGTSESATPESGPGTSTEPSEG | | | | |
| | SAPGTSTEPSEGSAPGTSESATPESG | | | | |
| | PGTSTEPSEGSAPGSEPATSGSETPG | | | | |
| | SPAGSPTSTEEGSSTPSGATGSPGTP | | | | |
| | GSGTASSSPGSSTPSGATGSPGTSTE | | | | |
| | PSEGSAPGTSTEPSEGSAPGSEPATS | | | | |
| | GSETPGSPAGSPTSTEEGSPAGSPTS | | | | |
| | TEEGTSTEPSEGSAPGPEPTGPAPSG | | | | |
| | GSEPATSGSETPGTSESATPESGPGS | | | | |
| | PAGSPTSTEEGTSESATPESGPGSPA | | | | |
| | GSPTSTEEGSPAGSPTSTEEGTSESA | | | | |
| | TPESGPGSPAGSPTSTEEGSPAGSPT | | | | |
| | STEEGSTSSTAESPGPGSTSESPSGT | | | | |
| | APGTSPSGESSTAPGSTSESPSGTAP | | | | |
| | GSTSESPSGTAPGTSPSGESSTAPGT | | | | |
| | STEPSEGSAPGTSESATPESGPGTSE | | | | |
| | SATPESGPGSEPATSGSETPGTSESA | | | | |
| | TPESGPGTSESATPESGPGTSTEPSE | | | | |
| | GSAPGTSESATPESGPGTSTEPSEGS | | | | |
| | APGTSPSGESSTAPGTSPSGESSTAP | | | | |
| | GTSPSGESSTAPGTSTEPSEGSAPGS | | | | |
| | PAGSPTSTEEGTSTEPSEGSAPGSSPS | | | | |
| | ASTGTGPGSSTPSGATGSPGSSTPSG | | | | |
| | ATGSPGSSTPSGATGSPGSSTPSGAT | | | | |
| | GSPGASPGTSSTGSPGASASGAPSTG | | | | |
| | GTSPSGESSTAPGSTSSTAESPGPGT | | | | |
| | SPSGESSTAPGTSESATPESGPGTST | | | | |
| | EPSEGSAPGTSTEPSEGSAPGSSPSA | | | | |
| | STGTGPGSSTPSGATGSPGASPGTSS | | | | |
| | TGSPGTSTPESGSASPGTSPSGESST | | | | |
| | APGTSPSGESSTAPGTSESATPESGP | | | | |
| | GSEPATSGSETPGTSTEPSEGSAPGS | | | | |
| | TSESPSGTAPGSTSESPSGTAPGTSTP | | | | |
| | ESGSASPGSPAGSPTSTEEGTSESAT | | | | |
| | PESGPGTSTEPSEGSAPGSPAGSPTS | | | | |
| | TEEGTSESATPESGPGSEPATSGSET | | | | |
| | PGSSTPSGATGSPGASPGTSSTGSPG | | | | |
| | SSTPSGATGSPGSTSESPSGTAPGTS | | | | |
| | PSGESSTAPGSTSSTAESPGPGSSTPS | | | | |
| | GATGSPGASPGTSSTGSPGTPGSGT | | | | |
| | ASSSPGSPAGSPTSTEEGSPAGSPTS | | | | |
| | TEEGTSTEPSEGSAP | | | | |
| AM923 | MAEPAGSPTSTEEGASPGTSSTGSP | 1126 | 924 | Residue totals: H: 4 | 98.70% |
| | GSSTPSGATGSPGSSTPSGATGSPGT | | | E: 3 percent: H: 0.4 | |
| | STEPSEGSAPGSEPATSGSETPGSPA | | | E: 0.3 | |
| | GSPTSTEEGSTSSTAESPGPGTSTPES | | | | |
| | GSASPGSTSESPSGTAPGSTSESPSG | | | | |
| | TAPGTSTPESGSASPGTSTPESGSAS | | | | |
| | PGSEPATSGSETPGTSESATPESGPG | | | | |
| | SPAGSPTSTEEGTSTEPSEGSAPGTS | | | | |
| | ESATPESGPGTSTEPSEGSAPGTSTE | | | | |
| | PSEGSAPGSPAGSPTSTEEGTSTEPS | | | | |
| | EGSAPGTSTEPSEGSAPGTSESATPE | | | | |
| | SGPGTSESATPESGPGTSTEPSEGSA | | | | |
| | PGTSTEPSEGSAPGTSESATPESGPG | | | | |
| | TSTEPSEGSAPGSEPATSGSETPGSP | | | | |
| | AGSPTSTEEGSSTPSGATGSPGTPGS | | | | |
| | GTASSSPGSSTPSGATGSPGTSTEPS | | | | |
| | EGSAPGTSTEPSEGSAPGSEPATSGS | | | | |
| | ETPGSPAGSPTSTEEGSPAGSPTSTE | | | | |
| | EGTSTEPSEGSAPGASASGAPSTGG | | | | |
| | TSESATPESGPGSPAGSPTSTEEGSP | | | | |
| | AGSPTSTEEGSTSSTAESPGPGSTSE | | | | |
| | SPSGTAPGTSPSGESSTAPGTPGSGT | | | | |
| | ASSSPGSSTPSGATGSPGSSPSASTG | | | | |
| | TGPGSEPATSGSETPGTSESATPESG | | | | |
| | PGSEPATSGSETPGSTSSTAESPGPG | | | | |
| | STSSTAESPGPGTSPSGESSTAPGSEP | | | | |
| | ATSGSETPGSEPATSGSETPGTSTEP | | | | |
| | SEGSAPGSTSSTAESPGPGTSTPESG | | | | |
| | SASPGSTSESPSGTAPGTSTEPSEGS | | | | |
| | APGTSTEPSEGSAPGTSTEPSEGSAP | | | | |
| | GSSTPSGATGSPGSSPSASTGTGPGA | | | | |
| | SPGTSSTGSPGSEPATSGSETPGTSES | | | | |
| | ATPESGPGSPAGSPTSTEEGSSTPSG | | | | |
| | ATGSPGSSPSASTGTGPGASPGTSST | | | | |
| | GSPGTSESATPESGPGTSTEPSEGSA | | | | |
| | PGTSTEPSEGSAP | | | | |
| AE912 | MAEPAGSPTSTEEGTPGSGTASSSP | 1127 | 913 | Residue totals: H: 8 | 99.45% |
| | GSSTPSGATGSPGASPGTSSTGSPGS | | | E: 3 percent: H: | |
| | PAGSPTSTEEGTSESATPESGPGTST | | | 0.9 E: 0.3 | |
| | EPSEGSAPGSPAGSPTSTEEGTSTEP | | | | |
| | SEGSAPGTSTEPSEGSAPGTSESATP | | | | |
| | ESGPGSEPATSGSETPGSEPATSGSE | | | | |
| | TPGSPAGSPTSTEEGTSESATPESGP | | | | |
| | GTSTEPSEGSAPGTSTEPSEGSAPGS | | | | |
| | PAGSPTSTEEGTSTEPSEGSAPGTST | | | | |
| | EPSEGSAPGTSESATPESGPGTSTEP | | | | |
| | SEGSAPGTSESATPESGPGSEPATSG | | | | |
| | SETPGTSTEPSEGSAPGTSTEPSEGS | | | | |
| | APGTSESATPESGPGTSESATPESGP | | | | |
| | GSPAGSPTSTEEGTSESATPESGPGS | | | | |
| | EPATSGSETPGTSESATPESGPGTST | | | | |
| | EPSEGSAPGTSTEPSEGSAPGTSTEP | | | | |
| | SEGSAPGTSTEPSEGSAPGTSTEPSE | | | | |
| | GSAPGTSTEPSEGSAPGSPAGSPTST | | | | |
| | EEGTSTEPSEGSAPGTSESATPESGP | | | | |
| | GSEPATSGSETPGTSESATPESGPGS | | | | |
| | EPATSGSETPGTSESATPESGPGTST | | | | |
| | EPSEGSAPGTSESATPESGPGSPAGS | | | | |
| | PTSTEEGSPAGSPTSTEEGSPAGSPT | | | | |
| | STEEGTSESATPESGPGTSTEPSEGS | | | | |
| | APGTSESATPESGPGSEPATSGSETP | | | | |
| | GTSESATPESGPGSEPATSGSETPGT | | | | |
| | SESATPESGPGTSTEPSEGSAPGSPA | | | | |
| | GSPTSTEEGTSESATPESGPGSEPAT | | | | |
| | SGSETPGTSESATPESGPGSPAGSPT | | | | |
| | STEEGSPAGSPTSTEEGTSTEPSEGS | | | | |
| | APGTSESATPESGPGTSESATPESGP | | | | |
| | GTSESATPESGPGSEPATSGSETPGS | | | | |
| | EPATSGSETPGSPAGSPTSTEEGTST | | | | |
| | EPSEGSAPGTSTEPSEGSAPGSEPAT | | | | |
| | SGSETPGTSESATPESGPGTSTEPSE | | | | |
| | GSAP | | | | |
| BC 864 | GTSTEPSEPGSAGTSTEPSEPGSAGS | 1128 | | Residue totals: H: 0 | 99.77% |
| | EPATSGTEPSGSGASEPTSTEPGSEP | | | E: 0 percent: H: 0 | |
| | ATSGTEPSGSEPATSGTEPSGSEPAT | | | E: 0 | |
| | SGTEPSGSGASEPTSTEPGTSTEPSEP | | | | |
| | GSAGSEPATSGTEPSGTSTEPSEPGS | | | | |
| | AGSEPATSGTEPSGSEPATSGTEPSG | | | | |
| | TSTEPSEPGSAGTSTEPSEPGSAGSE | | | | |
| | PATSGTEPSGSEPATSGTEPSGTSEP | | | | |
| | STSEPGAGSGASEPTSTEPGTSEPST | | | | |
| | SEPGAGSEPATSGTEPSGSEPATSGT | | | | |
| | EPSGTSTEPSEPGSAGTSTEPSEPGS | | | | |
| | AGSGASEPTSTEPGSEPATSGTEPSG | | | | |
| | SEPATSGTEPSGSEPATSGTEPSGSE | | | | |
| | PATSGTEPSGTSTEPSEPGSAGSEPA | | | | |
| | TSGTEPSGSGASEPTSTEPGTSTEPSE | | | | |
| | PGSAGSEPATSGTEPSGSGASEPTST | | | | |
| | EPGTSTEPSEPGSAGSGASEPTSTEP | | | | |
| | GSEPATSGTEPSGSGASEPTSTEPGS | | | | |
| | EPATSGTEPSGSGASEPTSTEPGTST | | | | |
| | EPSEPGSAGSEPATSGTEPSGSGASE | | | | |
| | PTSTEPGTSTEPSEPGSAGSEPATSG | | | | |
| | TEPSGTSTEPSEPGSAGSEPATSGTE | | | | |
| | PSGTSTEPSEPGSAGTSTEPSEPGSA | | | | |
| | GTSTEPSEPGSAGTSTEPSEPGSAGT | | | | |
| | STEPSEPGSAGTSTEPSEPGSAGTSE | | | | |
| | PSTSEPGAGSGASEPTSTEPGTSTEP | | | | |
| | SEPGSAGTSTEPSEPGSAGTSTEPSE | | | | |
| | PGSAGSEPATSGTEPSGSGASEPTST | | | | |
| | EPGSEPATSGTEPSGSEPATSGTEPS | | | | |
| | GSEPATSGTEPSGSEPATSGTEPSGT | | | | |
| | SEPSTSEPGAGSEPATSGTEPSGSGA | | | | |
| | SEPTSTEPGTSTEPSEPGSAGSEPATS | | | | |
| | GTEPSGSGASEPTSTEPGTSTEPSEP | | | | |
| | GSA | | | | |

*H: alpha-helix
E: beta-sheet

### Example 60: Analysis of Polypeptide Sequences for Repetitiveness

[0604] Polypeptide amino acid sequences can be assessed for repetitiveness by quantifying the number of times a shorter subsequence appears within the overall polypeptide. For example, a polypeptide of 200 amino acid residues has 192 overlapping 9-amino acid subsequences (or 9-mer “frames”), but the number of unique 9-mer subsequences will depend on the amount of repetitiveness within the sequence. In the present analysis, different sequences were assessed for repetitiveness by summing the occurrence of all unique 3-mer subsequences for each 3-amino acid frame across the first 200 amino acids of the polymer portion divided by the absolute number of unique 3-mer subsequences within the 200 amino acid sequence. The resulting subsequence score is a reflection of the degree of repetitiveness within the polypeptide.

[0605] The results, shown in Table 46, indicate that the unstructured polypeptides consisting of 2 or 3 amino acid types have high subsequence scores, while those of consisting of 12 amino acids motifs of the six amino acids G, S, T, E, P, and A with a low degree of internal repetitiveness, have subsequence scores of less than 10, and in some cases, less than 5. For example, the L288 sequence has two amino acid types and has short, highly repetitive sequences, resulting in a subsequence score of 50.0. The polypeptide J288 has three amino acid types but also has short, repetitive sequences, resulting in a subsequence score of 33.3. Y576 also has three amino acid types, but is not made of internal repeats, reflected in the subsequence score of 15.7 over the first 200 amino acids. W576 consists of four types of amino acids, but has a higher degree of internal repetitiveness, e.g., “GGSG” (SEQ ID NO: 1129), resulting in a subsequence score of 23.4. The AD576 consists of four types of 12 amino acid motifs, each consisting of four types of amino acids. Because of the low degree of internal repetitiveness of the individual motifs, the overall subsequence score over the first 200 amino acids is 13.6. In contrast, XTEN's consisting of four motifs contains six types of amino acids, each with a low degree of internal repetitiveness have lower subsequence scores; i.e., AE864 (6.1), AF864 (7.5), and AM875 (4.5).

[0606] Conclusions: The results indicate that the combination of 12 amino acid subsequence motifs, each consisting of four to six amino acid types that are essentially non-repetitive, into a longer XTEN polypeptide results in an overall sequence that is non-repetitive. This is despite the fact that each subsequence motif may be used multiple times across the sequence. In contrast, polymers created from smaller numbers of amino acid types resulted in higher subsequence scores, although the actual sequence can be tailored to reduce the degree of repetitiveness to result in lower subsequence scores.

TABLE 46
Subsequence score calculations of polypeptide sequences

| Seq | | SEQ ID | |
|---|---|---|---|
| Name | Amino Acid Sequence | NO: | Score |
| J288 | GSGGEGGSGGEGGSGGEGGSGGEGGSGGEGGSGGEGGSGGEG | 1130 | 33.3 |
| | GSGGEGGSGGEGGSGGEGGSGGEGGSGGEGGSGGEGGSGGEG | | |
| | GSGGEGGSGGEGGSGGEGGSGGEGGSGGEGGSGGEGGSGGEG | | |
| | GSGGEGGSGGEGGSGGEGGSGGEGGSGGEGGSGGEGGSGGEG | | |
| | GSGGEGGSGGEGGSGGEGGSGGEGGSGGEGGSGGEGGSGGEG | | |
| | GSGGEGGSGGEGGSGGEGGSGGEGGSGGEGGSGGEGGSGGEG | | |
| | GSGGEGGSGGEGGSGGEGGSGGEGGSGGEGGSGGEG | | |
| K288 | GEGEGGGEGGEGEGGGEGGEGEGGGEGGEGEGGGEGGEGEG | 1131 | 46.9 |
| | GGEGGEGEGGGEGGEGEGGGEGGEGEGGGEGGEGEGGGEGG | | |
| | EGEGGGEGGEGEGGGEGGEGEGGGEGGEGEGGGEGGEGEGG | | |
| | GEGGEGEGGGEGGEGEGGGEGGEGEGGGEGGEGEGGGEGGE | | |
| | GEGGGEGGEGEGGGEGGEGEGGGEGGEGEGGGEGGEGEGGG | | |
| | EGGEGEGGGEGGEGEGGGEGGEGEGGGEGGEGEGGGEGGEG | | |
| | EGGGEGGEGEGGGEGGEGEGGGEGGEGEGGGEGGEGEGGGE | | |
| | G | | |
| L288 | SSESSESSSSESSSESSESSSSESSSESSESSSSESSSESSESSSSESSS | 1132 | 50.0 |
| | ESSESSSSESSSESSESSSSESSSESSESSSSESSSESSESSSSESSSES | | |
| | SESSSSESSSESSESSSSESSSESSESSSSESSSESSESSSSESSSESSE | | |
| | SSSSESSSESSESSSSESSSESSESSSSESSSESSESSSSESSSESSESS | | |
| | SSESSSESSESSSSESSSESSESSSSESSSESSESSSSESSSESSESSSS | | |
| | ESSSESSESSSSESSSESSESSSSESSSESSESSSSES | | |
| Y288 | GEGSGEGSEGEGSEGSGEGEGSEGSGEGEGGSEGSEGEGGSEGS | 1133 | 26.8 |
| | EGEGGSEGSEGEGSGEGSEGEGGSEGSEGEGSGEGSEGEGSEGG | | |
| | SEGEGGSEGSEGEGSGEGSEGEGGEGGSEGEGSEGSGEGEGSGE | | |
| | GSEGEGSEGSGEGEGSGEGSEGEGSEGSGEGEGSEGSGEGEGGS | | |
| | EGSEGEGSEGSGEGEGGEGSGEGEGSGEGSEGEGGGEGSEGEG | | |
| | SGEGGEGEGSEGGSEGEGGSEGGEGEGSEGSGEGEGSEGGSEG | | |
| | EGSEGGSEGEGSEGSGEGEGSEGSGE | | |
| Q576 | GGKPGEGGKPEGGGGKPGGKPEGEGEGKPGGKPEGGGKPGGG | 1134 | 18.5 |
| | EGGKPEGGKPEGEGKPGGGEGKPGGKPEGGGGKPEGEGKPGG | | |
| | GGGKPGGKPEGEGKPGGGEGGKPEGKPGEGGEGKPGGKPEGG | | |
| | GEGKPGGGKPGEGGKPGEGKPGGGEGGKPEGGKPEGEGKPGG | | |
| | GEGKPGGKPGEGGKPEGGGEGKPGGKPGEGGEGKPGGGKPEG | | |
| | EGKPGGGKPGGGEGGKPEGEGKPGGKPEGGGEGKPGGKPEGG | | |
| | GKPEGGGEGKPGGGKPGEGGKPGEGEGKPGGKPEGEGKPGGE | | |
| | GGGKPEGKPGGGEGGKPEGGKPGEGGKPEGGKPGEGGEGKPG | | |
| | GGKPGEGGKPEGGGKPEGEGKPGGGGKPGEGGKPEGGKPEGG | | |
| | GEGKPGGGKPEGEGKPGGGEGKPGGKPEGGGGKPGEGGKPEG | | |
| | GKPGGEGGGKPEGEGKPGGKPGEGGGGKPGGKPEGEGKPGEG | | |
| | GEGKPGGKPEGGGEGKPGGKPEGGGEGKPGGGKPGEGGKPEG | | |
| | GGKPGEGGKPGEGGKPEGEGKPGGGEGKPGGKPGEGGKPEGG | | |
| | GEGKPGGKPGGEGGGKPEGGKPGEGGKPEG | | |
| U576 | GEGKPGGKPGSGGGKPGEGGKPGSGEGKPGGKPGSGGSGKPG | 1135 | 18.1 |
| | GKPGEGGKPEGGSGGKPGGGGKPGGKPGGEGSGKPGGKPEGG | | |
| | GKPEGGSGGKPGGKPEGGSGGKPGGKPGSGEGGKPGGGKPGG | | |
| | EGKPGSGKPGGEGSGKPGGKPEGGSGGKPGGKPEGGSGGKPG | | |
| | GSGKPGGKPGEGGKPEGGSGGKPGGSGKPGGKPEGGGSGKPG | | |
| | GKPGEGGKPGSGEGGKPGGGKPGGEGKPGSGKPGGEGSGKPG | | |
| | GKPGSGGEGKPGGKPEGGSGGKPGGGKPGGEGKPGSGGKPGE | | |
| | GGKPGSGGGKPGGKPGGEGEGKPGGKPGEGGKPGGEGSGKPG | | |
| | GGGKPGGKPGGEGGKPEGSGKPGGGSGKPGGKPEGGGGKPEG | | |
| | SGKPGGGGKPEGSGKPGGGKPEGGSGGKPGGSGKPGGKPGEG | | |
| | GGKPEGSGKPGGGSGKPGGKPEGGGKPEGGSGGKPGGKPEGG | | |
| | SGGKPGGKPGGEGSGKPGGKPGSGEGGKPGGKPGEGSGGKPG | | |
| | GKPEGGSGGKPGGSGKPGGKPEGGGSGKPGGKPGEGGKPGGE | | |
| | GSGKPGGSGKPG | | |
| W576 | GGSGKPGKPGGSGSGKPGSGKPGGGSGKPGSGKPGGGSGKPGS | 1136 | 23.4 |
| | GKPGGGSGKPGSGKPGGGGKPGSGSGKPGGGKPGGSGGKPGG | | |
| | GSGKPGKPGSGGSGKPGSGKPGGGSGGKPGKPGSGGSGGKPG | | |
| | KPGSGGGSGKPGKPGSGGSGGKPGKPGSGGSGGKPGKPGSGGS | | |
| | GKPGSGKPGGGSGKPGSGKPGSGGSGKPGKPGSGGSGKPGSGK | | |
| | PGSGSGKPGSGKPGGGSGKPGSGKPGSGGSGKPGKPGSGGGKP | | |
| | GSGSGKPGGGKPGSGSGKPGGGKPGGSGGKPGGSGGKPGKPG | | |
| | SGGGSGKPGKPGSGGGSGKPGKPGGSGSGKPGSGKPGGGSGKP | | |
| | GSGKPGSGGSGKPGKPGSGGSGGKPGKPGSGGGKPGSGSGKPG | | |
| | GGKPGSGSGKPGGGKPGSGSGKPGGGKPGSGSGKPGGSGKPGS | | |
| | GKPGGGSGGKPGKPGSGGSGKPGSGKPGSGGSGKPGKPGGSGS | | |
| | GKPGSGKPGGGSGKPGSGKPGGGSGKPGSGKPGGGSGKPGSG | | |
| | KPGGGGKPGSGSGKPGGSGGKPGKPGSGGSGGKPGKPGSGGS | | |
| | GKPGSGKPGGGSGGKPGKPGSGG | | |
| Y576 | GEGSGEGSEGEGSEGSGEGEGSEGSGEGEGGSEGSEGEGSEGSG | 1137 | 15.7 |
| | EGEGGEGSGEGEGSGEGSEGEGGGEGSEGEGSGEGGEGEGSEG | | |
| | GSEGEGGSEGGEGEGSEGSGEGEGSEGGSEGEGSEGGSEGEGSE | | |
| | GSGEGEGSEGSGEGEGSEGSGEGEGSEGSGEGEGSEGGSEGEG | | |
| | GSEGSEGEGSGEGSEGEGGSEGSEGEGGGEGSEGEGSGEGSEGE | | |
| | GGSEGSEGEGGSEGSEGEGGEGSGEGEGSEGSGEGEGSGEGSE | | |
| | GEGSEGSGEGEGSEGSGEGEGGSEGSEGEGSGEGSEGEGSEGSG | | |
| | EGEGSEGSGEGEGGSEGSEGEGGSEGSEGEGGSEGSEGEGGEGS | | |
| | GEGEGSEGSGEGEGSGEGSEGEGSEGSGEGEGSEGSGEGEGGSE | | |
| | GSEGEGSEGSGEGEGGEGSGEGEGSGEGSEGEGGGEGSEGEGS | | |
| | EGSGEGEGSEGSGEGEGSEGGSEGEGGSEGSEGEGSEGGSEGEG | | |
| | SEGGSEGEGSEGSGEGEGSEGSGEGEGSGEGSEGEGGSEGGEGE | | |
| | GSEGGSEGEGSEGGSEGEGGEGSGEGEGGGEGSEGEGSEGSGE | | |
| | GEGSGEGSE | | |
| AD576 | GSSESGSSEGGPGSGGEPSESGSSGSSESGSSEGGPGSSESGSSEG | 1138 | 13.6 |
| | GPGSSESGSSEGGPGSSESGSSEGGPGSSESGSSEGGPGESPGGS | | |
| | SGSESGSEGSSGPGESSGSSESGSSEGGPGSSESGSSEGGPGSSES | | |
| | GSSEGGPGSGGEPSESGSSGESPGGSSGSESGESPGGSSGSESGS | | |
| | GGEPSESGSSGSSESGSSEGGPGSGGEPSESGSSGSGGEPSESGSS | | |
| | GSEGSSGPGESSGESPGGSSGSESGSGGEPSESGSSGSGGEPSES | | |
| | GSSGSGGEPSESGSSGSSESGSSEGGPGESPGGSSGSESGESPGG | | |
| | SSGSESGESPGGSSGSESGESPGGSSGSESGESPGGSSGSESGSSE | | |
| | SGSSEGGPGSGGEPSESGSSGSEGSSGPGESSGSSESGSSEGGPG | | |
| | SGGEPSESGSSGSSESGSSEGGPGSGGEPSESGSSGESPGGSSGSE | | |
| | SGESPGGSSGSESGSSESGSSEGGPGSGGEPSESGSSGSSESGSSE | | |
| | GGPGSGGEPSESGSSGSGGEPSESGSSGESPGGSSGSESGSEGSS | | |
| | GPGESSGSSESGSSEGGPGSEGSSGPGESS | | |
| AE576 | AGSPAGSPTSTEEGTSESATPESGPGTSTEPSEGSAPGSPAGSPTS | 1139 | 6.1 |
| | TEEGTSTEPSEGSAPGTSTEPSEGSAPGTSESATPESGPGSEPATS | | |
| | GSETPGSEPATSGSETPGSPAGSPTSTEEGTSESATPESGPGTSTE | | |
| | PSEGSAPGTSTEPSEGSAPGSPAGSPTSTEEGTSTEPSEGSAPGTS | | |
| | TEPSEGSAPGTSESATPESGPGTSTEPSEGSAPGTSESATPESGPG | | |
| | SEPATSGSETPGTSTEPSEGSAPGTSTEPSEGSAPGTSESATPESG | | |
| | PGTSESATPESGPGSPAGSPTSTEEGTSESATPESGPGSEPATSGS | | |
| | ETPGTSESATPESGPGTSTEPSEGSAPGTSTEPSEGSAPGTSTEPS | | |
| | EGSAPGTSTEPSEGSAPGTSTEPSEGSAPGTSTEPSEGSAPGSPAG | | |
| | SPTSTEEGTSTEPSEGSAPGTSESATPESGPGSEPATSGSETPGTS | | |
| | ESATPESGPGSEPATSGSETPGTSESATPESGPGTSTEPSEGSAPG | | |
| | TSESATPESGPGSPAGSPTSTEEGSPAGSPTSTEEGSPAGSPTSTE | | |
| | EGTSESATPESGPGTSTEPSEGSAP | | |
| AF540 | GSTSSTAESPGPGSTSSTAESPGPGSTSESPSGTAPGSTSSTAESP | 1140 | 8.8 |
| | GPGSTSSTAESPGPGTSTPESGSASPGSTSESPSGTAPGTSPSGES | | |
| | STAPGSTSESPSGTAPGSTSESPSGTAPGTSPSGESSTAPGSTSES | | |
| | PSGTAPGSTSESPSGTAPGTSPSGESSTAPGSTSESPSGTAPGSTS | | |
| | ESPSGTAPGSTSESPSGTAPGTSTPESGSASPGSTSESPSGTAPGT | | |
| | STPESGSASPGSTSSTAESPGPGSTSSTAESPGPGTSTPESGSASP | | |
| | GTSTPESGSASPGSTSESPSGTAPGTSTPESGSASPGTSTPESGSA | | |
| | SPGSTSESPSGTAPGSTSESPSGTAPGSTSESPSGTAPGSTSSTAE | | |
| | SPGPGTSTPESGSASPGTSTPESGSASPGSTSESPSGTAPGSTSESP | | |
| | SGTAPGTSTPESGSASPGSTSESPSGTAPGSTSESPSGTAPGTSTP | | |
| | ESGSASPGTSPSGESSTAPGSTSSTAESPGPGTSPSGESSTAPGST | | |
| | SSTAESPGPGTSTPESGSASPGSTSESPSGTAP | | |
| Ap504 | GASPGTSSTGSPGSSPSASTGTGPGSSPSASTGTGPGTPGSGTAS | 1141 | 7.0 |
| | SSPGSSTPSGATGSPGSNPSASTGTGPGASPGTSSTGSPGTPGSG | | |
| | TASSSPGSSTPSGATGSPGTPGSGTASSSPGASPGTSSTGSPGASP | | |
| | GTSSTGSPGTPGSGTASSSPGSSTPSGATGSPGASPGTSSTGSPGT | | |
| | PGSGTASSSPGSSTPSGATGSPGSNPSASTGTGPGSSPSASTGTG | | |
| | PGSSTPSGATGSPGSSTPSGATGSPGASPGTSSTGSPGASPGTSST | | |
| | GSPGASPGTSSTGSPGTPGSGTASSSPGASPGTSSTGSPGASPGT | | |
| | SSTGSPGASPGTSSTGSPGSSPSASTGTGPGTPGSGTASSSPGASP | | |
| | GTSSTGSPGASPGTSSTGSPGASPGTSSTGSPGSSTPSGATGSPGS | | |
| | STPSGATGSPGASPGTSSTGSPGTPGSGTASSSPGSSTPSGATGSP | | |
| | GSSTPSGATGSPGSSTPSGATGSPGSSPSASTGTGPGASPGTSST | | |
| | GSP | | |
| AE864 | GSPAGSPTSTEEGTSESATPESGPGTSTEPSEGSAPGSPAGSPTST | 1142 | 6.1 |
| | EEGTSTEPSEGSAPGTSTEPSEGSAPGTSESATPESGPGSEPATSG | | |
| | SETPGSEPATSGSETPGSPAGSPTSTEEGTSESATPESGPGTSTEP | | |
| | SEGSAPGTSTEPSEGSAPGSPAGSPTSTEEGTSTEPSEGSAPGTST | | |
| | EPSEGSAPGTSESATPESGPGTSTEPSEGSAPGTSESATPESGPGS | | |
| | EPATSGSETPGTSTEPSEGSAPGTSTEPSEGSAPGTSESATPESGP | | |
| | GTSESATPESGPGSPAGSPTSTEEGTSESATPESGPGSEPATSGSE | | |
| | TPGTSESATPESGPGTSTEPSEGSAPGTSTEPSEGSAPGTSTEPSE | | |
| | GSAPGTSTEPSEGSAPGTSTEPSEGSAPGTSTEPSEGSAPGSPAGS | | |
| | PTSTEEGTSTEPSEGSAPGTSESATPESGPGSEPATSGSETPGTSE | | |
| | SATPESGPGSEPATSGSETPGTSESATPESGPGTSTEPSEGSAPGT | | |
| | SESATPESGPGSPAGSPTSTEEGSPAGSPTSTEEGSPAGSPTSTEE | | |
| | GTSESATPESGPGTSTEPSEGSAPGTSESATPESGPGSEPATSGSE | | |
| | TPGTSESATPESGPGSEPATSGSETPGTSESATPESGPGTSTEPSE | | |
| | GSAPGSPAGSPTSTEEGTSESATPESGPGSEPATSGSETPGTSESA | | |
| | TPESGPGSPAGSPTSTEEGSPAGSPTSTEEGTSTEPSEGSAPGTSE | | |
| | SATPESGPGTSESATPESGPGTSESATPESGPGSEPATSGSETPGS | | |
| | EPATSGSETPGSPAGSPTSTEEGTSTEPSEGSAP | | |
| AF864 | GSTSESPSGTAPGTSPSGESSTAPGSTSESPSGTAPGSTSESPSGT | 1143 | 7.5 |
| | APGTSTPESGSASPGTSTPESGSASPGSTSESPSGTAPGSTSESPS | | |
| | GTAPGTSPSGESSTAPGSTSESPSGTAPGTSPSGESSTAPGTSPSG | | |
| | ESSTAPGSTSSTAESPGPGTSPSGESSTAPGTSPSGESSTAPGSTS | | |
| | STAESPGPGTSTPESGSASPGTSTPESGSASPGSTSESPSGTAPGS | | |
| | TSESPSGTAPGTSTPESGSASPGSTSSTAESPGPGTSTPESGSASP | | |
| | GSTSESPSGTAPGTSPSGESSTAPGSTSSTAESPGPGTSPSGESST | | |
| | APGTSTPESGSASPGSTSSTAESPGPGSTSSTAESPGPGSTSSTAE | | |
| | SPGPGSTSSTAESPGPGTSPSGESSTAPGSTSESPSGTAPGSTSESP | | |
| | SGTAPGTSTPESGPXXXGASASGAPSTXXXXSESPSGTAPGSTS | | |
| | ESPSGTAPGSTSESPSGTAPGSTSESPSGTAPGSTSESPSGTAPGS | | |
| | TSESPSGTAPGTSTPESGSASPGTSPSGESSTAPGTSPSGESSTAP | | |
| | GSTSSTAESPGPGTSPSGESSTAPGTSTPESGSASPGSTSESPSGT | | |
| | APGSTSESPSGTAPGTSPSGESSTAPGSTSESPSGTAPGTSTPESG | | |
| | SASPGTSTPESGSASPGSTSESPSGTAPGTSTPESGSASPGSTSST | | |
| | AESPGPGSTSESPSGTAPGSTSESPSGTAPGTSPSGESSTAPGSTS | | |
| | STAESPGPGTSPSGESSTAPGTSTPESGSASPGTSPSGESSTAPGT | | |
| | SPSGESSTAPGTSPSGESSTAPGSTSSTAESPGPGSTSSTAESPGP | | |
| | GTSPSGESSTAPGSSPSASTGTGPGSSTPSGATGSPGSSTPSGATG | | |
| | SP | | |
| AG868 | GGSPGASPGTSSTGSPGSSPSASTGTGPGSSPSASTGTGPGTPGS | 1144 | 7.5 |
| | GTASSSPGSSTPSGATGSPGSNPSASTGTGPGASPGTSSTGSPGT | | |
| | PGSGTASSSPGSSTPSGATGSPGTPGSGTASSSPGASPGTSSTGSP | | |
| | GASPGTSSTGSPGTPGSGTASSSPGSSTPSGATGSPGASPGTSST | | |
| | GSPGTPGSGTASSSPGSSTPSGATGSPGSNPSASTGTGPGSSPSAS | | |
| | TGTGPGSSTPSGATGSPGSSTPSGATGSPGASPGTSSTGSPGASP | | |
| | GTSSTGSPGASPGTSSTGSPGTPGSGTASSSPGASPGTSSTGSPG | | |
| | ASPGTSSTGSPGASPGTSSTGSPGSSPSASTGTGPGTPGSGTASSS | | |
| | PGASPGTSSTGSPGASPGTSSTGSPGASPGTSSTGSPGSSTPSGAT | | |
| | GSPGSSTPSGATGSPGASPGTSSTGSPGTPGSGTASSSPGSSTPSG | | |
| | ATGSPGSSTPSGATGSPGSSTPSGATGSPGSSPSASTGTGPGASP | | |
| | GTSSTGSPGASPGTSSTGSPGTPGSGTASSSPGASPGTSSTGSPG | | |
| | ASPGTSSTGSPGASPGTSSTGSPGASPGTSSTGSPGTPGSGTASSS | | |
| | PGSSTPSGATGSPGTPGSGTASSSPGSSTPSGATGSPGTPGSGTA | | |
| | SSSPGSSTPSGATGSPGSSTPSGATGSPGSSPSASTGTGPGSSPSA | | |
| | STGTGPGASPGTSSTGSPGTPGSGTASSSPGSSTPSGATGSPGSSP | | |
| | SASTGTGPGSSPSASTGTGPGASPGTSSTGSPGASPGTSSTGSPG | | |
| | SSTPSGATGSPGSSPSASTGTGPGASPGTSSTGSPGSSPSASTGTG | | |
| | PGTPGSGTASSSPGSSTPSGATGSPGSSTPSGATGSPGASPGTSST | | |
| | GSP | | |
| AM875 | GTSTEPSEGSAPGSEPATSGSETPGSPAGSPTSTEEGSTSSTAESP | 1145 | 4.5 |
| | GPGTSTPESGSASPGSTSESPSGTAPGSTSESPSGTAPGTSTPESG | | |
| | SASPGTSTPESGSASPGSEPATSGSETPGTSESATPESGPGSPAGS | | |
| | PTSTEEGTSTEPSEGSAPGTSESATPESGPGTSTEPSEGSAPGTST | | |
| | EPSEGSAPGSPAGSPTSTEEGTSTEPSEGSAPGTSTEPSEGSAPGT | | |
| | SESATPESGPGTSESATPESGPGTSTEPSEGSAPGTSTEPSEGSAP | | |
| | GTSESATPESGPGTSTEPSEGSAPGSEPATSGSETPGSPAGSPTST | | |
| | EEGSSTPSGATGSPGTPGSGTASSSPGSSTPSGATGSPGTSTEPSE | | |
| | GSAPGTSTEPSEGSAPGSEPATSGSETPGSPAGSPTSTEEGSPAGS | | |
| | PTSTEEGTSTEPSEGSAPGASASGAPSTGGTSESATPESGPGSPA | | |
| | GSPTSTEEGSPAGSPTSTEEGSTSSTAESPGPGSTSESPSGTAPGT | | |
| | SPSGESSTAPGTPGSGTASSSPGSSTPSGATGSPGSSPSASTGTGP | | |
| | GSEPATSGSETPGTSESATPESGPGSEPATSGSETPGSTSSTAESP | | |
| | GPGSTSSTAESPGPGTSPSGESSTAPGSEPATSGSETPGSEPATSG | | |
| | SETPGTSTEPSEGSAPGSTSSTAESPGPGTSTPESGSASPGSTSESP | | |
| | SGTAPGTSTEPSEGSAPGTSTEPSEGSAPGTSTEPSEGSAPGSSTP | | |
| | SGATGSPGSSPSASTGTGPGASPGTSSTGSPGSEPATSGSETPGT | | |
| | SESATPESGPGSPAGSPTSTEEGSSTPSGATGSPGSSPSASTGTGP | | |
| | GASPGTSSTGSPGTSESATPESGPGTSTEPSEGSAPGTSTEPSEGS | | |
| | AP | | |
| AM1318 | GTSTEPSEGSAPGSEPATSGSETPGSPAGSPTSTEEGSTSSTAESP | 1146 | 4.5 |
| | GPGTSTPESGSASPGSTSESPSGTAPGSTSESPSGTAPGTSTPESG | | |
| | SASPGTSTPESGSASPGSEPATSGSETPGTSESATPESGPGSPAGS | | |
| | PTSTEEGTSTEPSEGSAPGTSESATPESGPGTSTEPSEGSAPGTST | | |
| | EPSEGSAPGSPAGSPTSTEEGTSTEPSEGSAPGTSTEPSEGSAPGT | | |
| | SESATPESGPGTSESATPESGPGTSTEPSEGSAPGTSTEPSEGSAP | | |
| | GTSESATPESGPGTSTEPSEGSAPGSEPATSGSETPGSPAGSPTST | | |
| | EEGSSTPSGATGSPGTPGSGTASSSPGSSTPSGATGSPGTSTEPSE | | |
| | GSAPGTSTEPSEGSAPGSEPATSGSETPGSPAGSPTSTEEGSPAGS | | |
| | PTSTEEGTSTEPSEGSAPGPEPTGPAPSGGSEPATSGSETPGTSES | | |
| | ATPESGPGSPAGSPTSTEEGTSESATPESGPGSPAGSPTSTEEGSP | | |
| | AGSPTSTEEGTSESATPESGPGSPAGSPTSTEEGSPAGSPTSTEEG | | |
| | STSSTAESPGPGSTSESPSGTAPGTSPSGESSTAPGSTSESPSGTA | | |
| | PGSTSESPSGTAPGTSPSGESSTAPGTSTEPSEGSAPGTSESATPE | | |
| | SGPGTSESATPESGPGSEPATSGSETPGTSESATPESGPGTSESAT | | |
| | PESGPGTSTEPSEGSAPGTSESATPESGPGTSTEPSEGSAPGTSPS | | |
| | GESSTAPGTSPSGESSTAPGTSPSGESSTAPGTSTEPSEGSAPGSP | | |
| | AGSPTSTEEGTSTEPSEGSAPGSSPSASTGTGPGSSTPSGATGSPG | | |
| | SSTPSGATGSPGSSTPSGATGSPGSSTPSGATGSPGASPGTSSTGS | | |
| | PGASASGAPSTGGTSPSGESSTAPGSTSSTAESPGPGTSPSGESST | | |
| | APGTSESATPESGPGTSTEPSEGSAPGTSTEPSEGSAPGSSPSAST | | |
| | GTGPGSSTPSGATGSPGASPGTSSTGSPGTSTPESGSASPGTSPSG | | |
| | ESSTAPGTSPSGESSTAPGTSESATPESGPGSEPATSGSETPGTST | | |
| | EPSEGSAPGSTSESPSGTAPGSTSESPSGTAPGTSTPESGSASPGS | | |
| | PAGSPTSTEEGTSESATPESGPGTSTEPSEGSAPGSPAGSPTSTEE | | |
| | GTSESATPESGPGSEPATSGSETPGSSTPSGATGSPGASPGTSSTG | | |
| | SPGSSTPSGATGSPGSTSESPSGTAPGTSPSGESSTAPGSTSSTAE | | |
| | SPGPGSSTPSGATGSPGASPGTSSTGSPGTPGSGTASSSPGSPAGS | | |
| | PTSTEEGSPAGSPTSTEEGTSTEPSEGSAP | | |

### Example 61: Calculation of TEPITOPE Scores

[0607] TEPITOPE scores of 9mer peptide sequence can be calculated by adding pocket potentials as described by Sturniolo [Sturniolo, T., et al. (1999) Nat Biotechnol, 17: 555]. In the present Example, separate Tepitope scores were calculated for individual HLA alleles. Table 47 shows as an example the pocket potentials for HLA*0101B, which occurs in high frequency in the Caucasian population. To calculate the TEPITOPE score of a peptide with sequence P1-P2-P3-P4-P5-P6-P7-P8-P9, the corresponding individual pocket potentials in Table 47 were added. The HLA*0101B score of a 9mer peptide with the sequence FDKLPRTSG (SEQ ID NO: 1147) is the sum of 0, −1.3, 0, 0.9, 0, −1.8, 0.09, 0, 0.

[0608] To evaluate the TEPITOPE scores for long peptides one can repeat the process for all 9mer subsequences of the sequences. This process can be repeated for the proteins encoded by other HLA alleles. Tables 48-51 give pocket potentials for the protein products of HLA alleles that occur with high frequency in the Caucasian population.

[0609] TEPITOPE scores calculated by this method range from approximately −10 to +10. However, 9mer peptides that lack a hydrophobic amino acid (FKLMVWY) (SEQ ID NO: 1148) in P1 position have calculated TEPITOPE scores in the range of −1009 to −989. This value is biologically meaningless and reflects the fact that a hydrophobic amino acid serves as an anchor residue for HLA binding and peptides lacking a hydrophobic residue in P1 are considered non binders to HLA. Because most XTEN sequences lack hydrophobic residues, all combinations of 9mer subsequences will have TEPITOPEs in the range in the range of −1009 to −989. This method confirms that XTEN polypeptides may have few or no predicted T-cell epitopes.

TABLE 47
Pocket potential for HLA*0101B allele.

| Amino Acid | P1 | P2 | P3 | P4 | P5 | P6 | P7 | P8 | P9 |
|---|---|---|---|---|---|---|---|---|---|
| A | −999 | 0 | 0 | 0 | — | 0 | 0 | — | 0 |
| C | −999 | 0 | 0 | 0 | — | 0 | 0 | — | 0 |
| D | −999 | −1.3 | −1.3 | −2.4 | — | −2.7 | −2 | — | −1.9 |
| E | −999 | 0.1 | −1.2 | −0.4 | — | −2.4 | −0.6 | — | −1.9 |
| F | 0 | 0.8 | 0.8 | 0.08 | — | −2.1 | 0.3 | — | −0.4 |
| G | −999 | 0.5 | 0.2 | −0.7 | — | −0.3 | −1.1 | — | −0.8 |
| H | −999 | 0.8 | 0.2 | −0.7 | — | −2.2 | 0.1 | — | −1.1 |
| I | −1 | 1.1 | 1.5 | 0.5 | — | −1.9 | 0.6 | — | 0.7 |
| K | −999 | 1.1 | 0 | −2.1 | — | −2 | −0.2 | — | −1.7 |
| L | −1 | 1 | 1 | 0.9 | — | −2 | 0.3 | — | 0.5 |
| M | −1 | 1.1 | 1.4 | 0.8 | — | −1.8 | 0.09 | — | 0.08 |
| N | −999 | 0.8 | 0.5 | 0.04 | — | −1.1 | 0.1 | — | −1.2 |
| P | −999 | −0.5 | 0.3 | −1.9 | — | −0.2 | 0.07 | — | −1.1 |
| Q | −999 | 1.2 | 0 | 0.1 | — | −1.8 | 0.2 | — | −1.6 |
| R | −999 | 2.2 | 0.7 | −2.1 | — | −1.8 | 0.09 | — | −1 |
| S | −999 | −0.3 | 0.2 | −0.7 | — | −0.6 | −0.2 | — | −0.3 |
| T | −999 | 0 | 0 | −1 | — | −1.2 | 0.09 | — | −0.2 |
| V | −1 | 2.1 | 0.5 | −0.1 | — | −1.1 | 0.7 | — | 0.3 |
| W | 0 | −0.1 | 0 | −1.8 | — | −2.4 | −0.1 | — | −1.4 |
| Y | 0 | 0.9 | 0.8 | −1.1 | — | −2 | 0.5 | — | −0.9 |

TABLE 48
Pocket potential for HLA*0301B allele.

| Amino acid | P1 | P2 | P3 | P4 | P5 | P6 | P7 | P8 | P9 |
|---|---|---|---|---|---|---|---|---|---|
| A | −999 | 0 | 0 | 0 | — | 0 | 0 | — | 0 |
| C | −999 | 0 | 0 | 0 | — | 0 | 0 | — | 0 |
| D | −999 | −1.3 | −1.3 | 2.3 | — | −2.4 | −0.6 | — | −0.6 |
| E | −999 | 0.1 | −1.2 | −1 | — | −1.4 | −0.2 | — | −0.3 |
| F | −1 | 0.8 | 0.8 | −1 | — | −1.4 | 0.5 | — | 0.9 |
| G | −999 | 0.5 | 0.2 | 0.5 | — | −0.7 | 0.1 | — | 0.4 |
| H | −999 | 0.8 | 0.2 | 0 | — | −0.1 | −0.8 | — | −0.5 |
| I | 0 | 1.1 | 1.5 | 0.5 | — | 0.7 | 0.4 | — | 0.6 |
| K | −999 | 1.1 | 0 | −1 | — | 1.3 | −0.9 | — | −0.2 |
| L | 0 | 1 | 1 | 0 | — | 0.2 | 0.2 | — | −0 |
| M | 0 | 1.1 | 1.4 | 0 | — | −0.9 | 1.1 | — | 1.1 |
| N | −999 | 0.8 | 0.5 | 0.2 | — | −0.6 | −0.1 | — | −0.6 |
| P | −999 | −0.5 | 0.3 | −1 | — | 0.5 | 0.7 | — | −0.3 |
| Q | −999 | 1.2 | 0 | 0 | — | −0.3 | −0.1 | — | −0.2 |
| R | −999 | 2.2 | 0.7 | −1 | — | 1 | −0.9 | — | 0.5 |
| S | −999 | −0.3 | 0.2 | 0.7 | — | −0.1 | 0.07 | — | 1.1 |
| T | −999 | 0 | 0 | −1 | — | 0.8 | −0.1 | — | −0.5 |
| V | 0 | 2.1 | 0.5 | 0 | — | 1.2 | 0.2 | — | 0.3 |
| W | −1 | −0.1 | 0 | −1 | — | −1.4 | −0.6 | — | −1 |
| Y | −1 | 0.9 | 0.8 | −1 | — | −1.4 | −0.1 | — | 0.3 |

TABLE 49
Pocket potential for HLA*0401B allele.

| Amino acid | P1 | P2 | P3 | P4 | P5 | P6 | P7 | P8 | P9 |
|---|---|---|---|---|---|---|---|---|---|
| A | −999 | 0 | 0 | 0 | — | 0 | 0 | — | 0 |
| C | −999 | 0 | 0 | 0 | — | 0 | 0 | — | 0 |
| D | −999 | −1.3 | −1.3 | 1.4 | — | −1.1 | −0.3 | — | −1.7 |
| E | −999 | 0.1 | −1.2 | 1.5 | — | −2.4 | 0.2 | — | −1.7 |
| F | 0 | 0.8 | 0.8 | −0.9 | — | −1.1 | −1 | — | −1 |
| G | −999 | 0.5 | 0.2 | −1.6 | — | −1.5 | −1.3 | — | −1 |
| H | −999 | 0.8 | 0.2 | 1.1 | — | −1.4 | 0 | — | 0.08 |
| I | −1 | 1.1 | 1.5 | 0.8 | — | −0.1 | 0.08 | — | −0.3 |
| K | −999 | 1.1 | 0 | −1.7 | — | −2.4 | −0.3 | — | −0.3 |
| L | −1 | 1 | 1 | 0.8 | — | −1.1 | 0.7 | — | −1 |
| M | −1 | 1.1 | 1.4 | 0.9 | — | −1.1 | 0.8 | — | −0.4 |
| N | −999 | 0.8 | 0.5 | 0.9 | — | 1.3 | 0.6 | — | −1.4 |
| P | −999 | −0.5 | 0.3 | −1.6 | — | 0 | −0.7 | — | −1.3 |
| Q | −999 | 1.2 | 0 | 0.8 | — | −1.5 | 0 | — | 0.5 |
| R | −999 | 2.2 | 0.7 | −1.9 | — | −2.4 | −1.2 | — | −1 |
| S | −999 | −0.3 | 0.2 | 0.8 | — | 1 | −0.2 | — | 0.7 |
| T | −999 | 0 | 0 | 0.7 | — | 1.9 | −0.1 | — | −1.2 |
| V | −1 | 2.1 | 0.5 | −0.9 | — | 0.9 | 0.08 | — | −0.7 |
| W | 0 | −0.1 | 0 | −1.2 | — | −1 | −1.4 | — | −1 |
| Y | 0 | 0.9 | 0.8 | −1.6 | — | −1.5 | −1.2 | — | −1 |

TABLE 50
Pocket potential for HLA*0701B allele.

| Amino acid | P1 | P2 | P3 | P4 | P5 | P6 | P7 | P8 | P9 |
|---|---|---|---|---|---|---|---|---|---|
| A | −999 | 0 | 0 | 0 | — | 0 | 0 | — | 0 |
| C | −999 | 0 | 0 | 0 | — | 0 | 0 | — | 0 |
| D | −999 | −1.3 | −1.3 | −1.6 | — | −2.5 | −1.3 | — | −1.2 |
| E | −999 | 0.1 | −1.2 | −1.4 | — | −2.5 | 0.9 | — | −0.3 |
| F | 0 | 0.8 | 0.8 | 0.2 | — | −0.8 | 2.1 | — | 2.1 |
| G | −999 | 0.5 | 0.2 | −1.1 | — | −0.6 | 0 | — | −0.6 |
| H | −999 | 0.8 | 0.2 | 0.1 | — | −0.8 | 0.9 | — | −0.2 |
| I | −1 | 1.1 | 1.5 | 1.1 | — | −0.5 | 2.4 | — | 3.4 |
| K | −999 | 1.1 | 0 | −1.3 | — | −1.1 | 0.5 | — | −1.1 |
| L | −1 | 1 | 1 | −0.8 | — | −0.9 | 2.2 | — | 3.4 |
| M | −1 | 1.1 | 1.4 | −0.4 | — | −0.8 | 1.8 | — | 2 |
| N | −999 | 0.8 | 0.5 | −1.1 | — | −0.6 | 1.4 | — | −0.5 |
| P | −999 | −0.5 | 0.3 | −1.2 | — | −0.5 | −0.2 | — | −0.6 |
| Q | −999 | 1.2 | 0 | −1.5 | — | −1.1 | 1.1 | — | −0.9 |
| R | −999 | 2.2 | 0.7 | −1.1 | — | −1.1 | 0.7 | — | −0.8 |
| S | −999 | −0.3 | 0.2 | 1.5 | — | 0.6 | 0.4 | — | −0.3 |
| T | −999 | 0 | 0 | 1.4 | — | −0.1 | 0.9 | — | 0.4 |
| V | −1 | 2.1 | 0.5 | 0.9 | — | 0.1 | 1.6 | — | 2 |
| W | 0 | −0.1 | 0 | −1.1 | — | −0.9 | 1.4 | — | 0.8 |
| Y | 0 | 0.9 | 0.8 | −0.9 | — | −1 | 1.7 | — | 1.1 |

TABLE 51
Pocket potential for HLA*1501B allele.

| Amino acid | P1 | P2 | P3 | P4 | P5 | P6 | P7 | P8 | P9 |
|---|---|---|---|---|---|---|---|---|---|
| A | −999 | 0 | 0 | 0 | — | 0 | 0 | — | 0 |
| C | −999 | 0 | 0 | 0 | — | 0 | 0 | — | 0 |
| D | −999 | −1.3 | −1.3 | −0.4 | — | −0.4 | −0.7 | — | −1.9 |
| E | −999 | 0.1 | −1.2 | −0.6 | — | −1 | −0.7 | — | −1.9 |
| F | −1 | 0.8 | 0.8 | 2.4 | — | −0.3 | 1.4 | — | −0.4 |
| G | −999 | 0.5 | 0.2 | 0 | — | 0.5 | 0 | — | −0.8 |
| H | −999 | 0.8 | 0.2 | 1.1 | — | −0.5 | 0.6 | — | −1.1 |
| I | 0 | 1.1 | 1.5 | 0.6 | — | 0.05 | 1.5 | — | 0.7 |
| K | −999 | 1.1 | 0 | −0.7 | — | −0.3 | −0.3 | — | −1.7 |
| L | 0 | 1 | 1 | 0.5 | — | 0.2 | 1.9 | — | 0.5 |
| M | 0 | 1.1 | 1.4 | 1 | — | 0.1 | 1.7 | — | 0.08 |
| N | −999 | 0.8 | 0.5 | −0.2 | — | 0.7 | 0.7 | — | −1.2 |
| P | −999 | −0.5 | 0.3 | −0.3 | — | −0.2 | 0.3 | — | −1.1 |
| Q | −999 | 1.2 | 0 | −0.8 | — | −0.8 | −0.3 | — | −1.6 |
| R | −999 | 2.2 | 0.7 | 0.2 | — | 1 | −0.5 | — | −1 |
| S | −999 | −0.3 | 0.2 | −0.3 | — | 0.6 | 0.3 | — | −0.3 |
| T | −999 | 0 | 0 | −0.3 | — | −0 | 0.2 | — | −0.2 |
| V | 0 | 2.1 | 0.5 | 0.2 | — | −0.3 | 0.3 | — | 0.3 |
| W | −1 | −0.1 | 0 | 0.4 | — | −0.4 | 0.6 | — | −1.4 |
| Y | −1 | 0.9 | 0.8 | 2.5 | — | 0.4 | 0.7 | — | −0.9 |

### Example 62: GPCR Ca2⁺ Mobilization Activity Assay

[0610] Recombinant GLP2-2G-XTEN was prepared as described in Alters, S. et al. (2012) GLP2-2G-XTEN: a pharmaceutical protein with improved serum half-life and efficacy in a rat Crohn's disease model. PLoS One; 7(11): e50630. The conjugate GLP2-2G-XTEN was prepared as described in Example 26 (FIGS. 68A-68B) and purified by preparative RP-HPLC (FIGS. 70A-70B). A GPCR Ca2+ flux mobilization activity assay was performed using an EMD Millipore ChemiSCREEN human recombinant GLP-2 glucagon family receptor calcium-optimized stable cell line, used according to manufacturer's instructions, with results presented in FIG. 110. Both the recombinant and conjugated GLP2-2G-XTEN were profiled as an eight-point, three-fold serial dilution dose response curve. Dose response curves were fitted using a 4PL-regression plot with respective Y-axis RFU, with data expressed as a percentage of absolute maximum RFU against concentration on the X-axis. Both recombinant GLP2-2G-XTEN and conjugate GLP2-2G-XTEN exhibited dose-dependent agonist activity with predicted EC50 potency values of 423 nM and 529 nM, respectively.

### Example 63: In Vitro Plasma Stability Assay of Conjugate GLP2-2G-XTEN

[0611] Equal concentrations of recombinant GLP2-2G-XTEN and conjugate GLP2-2G-XTEN were independently spiked into respective rat, cynomolgus monkey and human plasma. Samples were incubated at 37° C. for up to 10 days with an aliquot removed at appropriate time interval and stored at −80° C. until analysis. The plasma stability of conjugated GLP2-2G-XTEN in the various species was compared to that of recombinant GLP2-2G-XTEN on an anti-XTEN/GLP2 ELISA performed in the respective plasma matrices. The anti-XTEN/GLP2 ELISA comprised of the anti-XTEN mouse antibody as a capture antibody and a biotinylated anti-human GLP2 antibody as a detection antibody. As shown in FIG. 111, the in vitro stability in human plasma of conjugate GLP2-2G-XTEN is comparable to that of recombinant GLP2-2G-XTEN having an calculated stability half-life of >240 h. Similar in vitro stability was also observed with the two GLP2-2G-XTEN proteins in rat and cynomolgus monkey plasma (data not shown).

### Example 64: Pharmacokinetics of Conjugate GLP2-2G-XTEN in Rats

[0612] Female SD strain rats (200-220 g) were randomly assigned into groups of 3 animals each. Recombinant GLP-2G-XTEN and conjugate GLP2-2G-XTEN were administered by subcutaneous injection at 2 mg/kg into each animal. Blood samples (0.2 ml) were collected in pre-chilled heparinized microtainer tubes at pre-dose, 0.08, 4, 8, 24, 48, 72, 96, 120 and 168 hours after test compound administration. The blood was then processed to plasma and stored immediately at −80° C. until analysis. Plasma samples were analyzed using an anti-XTEN/GLP2 ELISA that uses the mouse anti-XTEN antibody as a capture antibody and a biotinylated anti-human GLP2 antibody as a detection antibody. The ELISA was performed using relevant recombinant GLP2-2G-XTEN or conjugate GLP2-2G-XTEN as the respective ELISA calibration standards (FIG. 112). The calculated half-life of recombinant GLP2-2G-XTEN (36 (±7) h) and conjugate GLP2-2G-XTEN (37 (±7) h) was found to be similar.

### Example 65: Trimeric XTEN Conjugate Linked Via C-Terminal Cysteines

[0613] A trimeric XTEN conjugate was prepared by the following procedure. An aliquot of the XTEN protein 1× Amino,1× Thiol-XTEN432 (XTEN_AE432(Am1,C422)), with one internal cysteine residue, was prepared as a 587 μM (23.23 mg/ml) solution in 20 mM HEPES, pH 7.0, 50 mM NaCl. Tris-[2-maleimidoethyl]amine (TMEA, Thermo Scientific, cat. #33043) was dissolved in anhydrous DMF to a final concentration 10 mM. TMEA was added to the protein solution to link to the thiol group of the XTEN (5× molar excess of protein over linker). The reaction mixture was incubated for 2 hrs at 25° C., and the products of the reaction were analyzed by SEC-HPLC (Phenomenex BioSep-SEC-s4000 600×7.80 mm, buffer: 50 mM Sodium Phosphate pH 6.5, 300 mM NaCl, flow rate 0.5 ml/min, isocratic elution for 70 min). Linear XTEN 432, XTEN_864 and XTEN_1296 (having 432, 864, and 1296 amino acids, respectively) were analyzed under the same conditions to identify reaction products (FIGS. 113A-113D). Peak 1 eluted at 28 min, the same time as XTEN_1296 and was identified as a trimer of XTEN_432. Peak 2 eluted at 30.5 min, the same time as XTEN_864 and was identified as a dimer of XTEN_432. Peak 3 eluted at 35 min, the same time as XTEN_432 and was identified as XTEN_432 precursor. The yields of trimeric XTEN conjugate and dimeric XTEN conjugate were 19% and 36%, respectively. Essentially identical retention times for the trimeric conjugate 3×XTEN_432 and the linear molecule XTEN_12% suggest that the apparent molecular weight and hydrodynamic radius of an XTEN protein is not dependent on its geometric configuration.

### Example 66: Trimeric XTEN Conjugates Linked Via N-Terminal α-Amino Groups

[0614] A trimeric XTEN conjugate was prepared by the following procedure.

[0615] 1. Synthesis of 1×DBCO-XTEN288

[0616] An aliquot of the protein 1× Amino-XTEN288 (XTEN_AE288(Am1)) was prepared as a 758 μM (20 mg/ml) solution in 20 mM HEPES, pH 7.0, 50 mM NaCl. 2 ml of protein was mixed with 0.1 ml 1M HEPES pH 8.0 and 0.152 ml of 50 mM DBCO-Sulfo-NHS (Click Chemistry Tools, cat. #A124) dissolved in anhydrous DMF to link the DBCO group to the N-terminal amino group of the XTEN. The reaction mixture was incubated for 2 hours at 25° C., and analyzed by analytical RP-HPLC (FIG. 114A). The reaction mixture was diluted to 15 mL with 0.01% TFA and pH adjusted to −3 using 10% TFA solution. The protein solution was divided into two equal parts and each fraction was loaded on a preparative C4 RP-HPLC column Vydac C4 250×10 mm (Grace Davison Discovery Sciences, cat. #214TP510). The protein was eluted with a 180 ml linear 5-50% gradient of acetonitrile in 0.01% TFA at 2 ml/min flow rate. Fractions containing 1×DBCO-XTEN288 were adjusted to pH˜7 with 1 M HEPES pH 8 and were concentrated by vacuum evaporation.

[0617] 2. Synthesis of 3× Azide-PEG4-TAEA

[0618] Tris(2-aminoethyl)amine (TAEA, Sigma Aldrich, cat. #225630) was diluted in anhydrous DMF to the final concentration 200 mM. Azido-PEG4-NHS ester (Click Chemistry Tools, cat. #AZ103) was dissolved in anhydrous DMF to the final concentration 1 M. Azido-PEG4-NHS was mixed in 5-fold molar excess with Tris(2-aminoethyl)amine and incubated at 25° C. for 1 hour. 3× Azide-PEG4-TAEA was purified using C18 RP-HPLC using Phenomenex Jupiter C18 5u 300 A 150×4.60 mm column, buffer A 0.1% TFA in water, buffer B 0.1% TFA in acetonitrile, flow rate 1 ml/min, gradient 5 to 50% B in 45 min. Chromatographic peaks were collected and analyzed by MALDI-TOF MS and ESI-MS to detect the product with MW of 966 Da. 3× Azide-PEG4-TAEA was identified as a peak with retention time 33 min (FIG. 114B). The fraction was neutralized using 1M HEPES pH 8.0 and concentrated by vacuum evaporation.

[0619] 3. Synthesis of the Trimeric XTEN Conjugate

[0620] 1×DBCO-XTEN288 was prepared as a 7.85 mg/ml (293 uM) solution in 20 mM HEPES, pH 7.0, 50 mM NaCl. 3× Azide-PEG4-TAEA was RP-HPLC purified and formulated in the same buffer. A concentration of the synthesized linker was not determined, and 1×DBCO-XTEN288 and 3× Azide-PEG4-TAEA were mixed empirically in various ratios and incubated at 25° C. for 4 hours. Conjugation products were analyzed using SEC-HPLC (Phenomenex BioSep-SEC-s4000 600×7.80 mm, buffer: 50 mM Sodium Phosphate pH 6.5, 300 mM NaCl, flow rate 0.5 ml/min, isocratic elution for 70 min). Linear XTEN_288, XTEN_576 and XTEN_864 were analyzed under the same conditions to identify reaction products (FIG. 115). Peak 1 eluted at 30.5 min, the same time as XTEN_864 and was identified as a trimer of XTEN288. Peak 2 eluted at 34 min, the same time as XTEN_576 and was identified as a dimer of XTEN_288. Peak 3 eluted at 39 min, the same time as XTEN_288 and was identified as XTEN_288 precursor. Peak 4 corresponded to low molecular weight compounds and was not included into quantitation of XTEN species. The yield of the trimeric XTEN conjugate under the optimized protein/linker ratio was 57%. Essentially identical retention times for trimeric conjugate 3×XTEN_288 and linear molecule XTEN_864 confirms the earlier observation that the apparent molecular weight and hydrodynamic radius of an XTEN protein is not dependent on its geometric configuration.

### Example 67: Selective Cytotoxicity of 3×FA(γ),3×MMAE-XTEN on KB Cells

[0621] The ability to selectively target and kill cells bearing folate receptors was evaluated. Test articles of free MMAE, a non-targeting 3×MMAE-XTEN conjugate (XTEN linked to toxin) and the folate receptor-targeted 3×FA(γ),3×MMAE-XTEN conjugate were evaluated in a CellTiter-Glo anti-proliferation assay using the folate receptor-positive KB cell line. As culture media contain high folic acid content, KB cells were grown in folic acid-free media containing 10% heat-inactivated fetal calf serum at 37° C., 5% CO2 for at least 7 days prior to the commencement of the cell viability experiment, This medium was also utilized for the execution of the experiment. In brief, KB cells were plated at 10,000 cells per well onto a 96-well microtiter assay plate. KB cells were allowed to adhere to the plate by an overnight incubation at 37° C., 5% CO2. The spent media was then removed and wells designated to contain folic acid competitor received assay medium containing folic acid, while wells not designated to have folic acid competitor received assay medium only. The plate was incubated for 30 min at 37° C., 5% CO2 before the assay media was aspirated and plate washed with assay media. Free MMAE, 3×MMAE-XTEN and 3×FA(γ),3×MMAE-XTEN in the presence or absence of folic acid competitor was then added at an appropriate range of doses. The plate was then further incubated for 2-4 h at 37° C., 5% CO2. Media was then removed, the plate washed and fresh media introduced and the plate was allowed to incubate for an additional 48-72 h. After the appropriate incubation period, CellTiter-Glo reagent was added and the plate was read on a luminometer. The IC50 of each test article was determined using a 4 parameter logistic curve fit using GraphPad Prism.

[0622] Results: As shown in FIG. 116, free MMAE drug moiety shows highly potent killing of KB cells, with an IC50 of 0.8 nM, while 3 copies of MMAE conjugated to non-targeting XTEN resulted in at least a 3 log reduction in cell killing (IC50>1,000 nM). Significantly, the addition of 3 copies of folate targeting domains to the 3×MMAE-XTEN conjugate restored the cell killing, with an IC 50 of 4.2 nM; a level of activity close to that observed for free MMAE. Of equal importance, the introduction of folic acid as a competitor to the targeted conjugate impaired the observed cell killing activity of 3×FA(γ),3×MMAE-XTEN on the KB cell line. This reduction from potent cell killing of the folate-XTEN drug conjugate (from 4.2 nM to >1,000 nM) supports the conclusion that the detected cell toxicity was, under the experimental conditions, facilitated by use of the folate as the targeting mechanism for the drug conjugate against the KB cell line.

### Example 68: In Vitro Cell-Based Screening of Folate-XTEN-Drug Conjugates for Activity and Specificity

[0623] The ability to selectively target and kill cells bearing folate receptors using targeted folate-XTEN-drug conjugates is evaluated using an in vitro-based screening and selectivity assay.

[0624] Each folate-XTEN-drug conjugate, its corresponding non-targeting XTEN-drug molecule and respective free drug control will be tested in a CellTiter-Glo anti-proliferation assay against a panel of folate receptor positive and negative cell lines. Choice of cell lines is based on relevance to proposed clinical application and includes KB, IGROV, SK-OV-3, HeLa, LoVo, SW620, Madison 109, A549, A375, LS-174T, HT-29, 4T1, SK-BR-3. As culture media contain high folic acid content, cells will be grown and assay performed in folic acid free-media containing 5-10% heat-inactivated fetal calf serum (FCS) at 37° C., 5% CO₂. Heat-inactivated FCS contains endogenous level of folic acid sufficient for folate receptor expressing cells to survive and proliferate. Appropriate assay conditions including optimal cell density and incubation time are pre-determined in folate-free media containing 5-10% FCS using the respective free drug as control. Folate-XTEN-drug conjugates are then tested as follows: cells in log-phase are collected, counted and plated at pre-determined cell density onto each well of a 96-well microtiter assay plate. Adherent cells are allowed to attach to the plate by an overnight incubation at 37° C., 5% CO₂. Folate-XTEN-drug conjugates and corresponding controls are introduced in a dose range in duplicates and plate incubated for an additional 2 to 5 days. Alternatively, cells can also be pulsed with folate-XTEN-drug conjugates and corresponding controls for 2-6 h, washed, fresh media introduced and allowed to incubate for an additional 48-72 h. After the appropriate incubation period, CellTiter-Glo reagent is added to each well, mixed for 2 minute on an orbital shaker. Plate is then centrifuged at 90 g and incubated at room temperature for an additional 10 minutes to stabilize the luminescent signal. Luminescence signals are then read on a luminometer & IC₅₀s (half maximal inhibitory concentration) calculated with GraphPad Prism or equivalent software. Quantitative comparisons of IC₅₀s will enable ranking of the compounds' activity for inhibition of cell growth and selectivity against folate receptor positive versus negative cell lines.

[0625] It is expected that the results would support the finding that the folate-XTEN-drug conjugates will show highly selective potent killing on folate receptor positive cells but not on folate receptor negative cells. This will be in contrast to the free drug moiety whereby no discrimination in the strong cytotoxicity is expected between folate receptor positive and negative cell lines. The XTEN-drug control is expected to yield poor cytotoxic activity. The folate-XTEN-drug conjugate with the most favorable activity and cell line selectivity relative to controls will be further verified for folate receptor association by the addition of free competitive folic acid in the assay and demonstrating impaired folate-XTEN-drug cytotoxicity.

### Example 69: In Vitro Cell-Based Screening of LHRH-XTEN-Drug Conjugates for Activity and Specificity

[0626] The ability to selectively target and kill cells bearing LHRH receptors using targeted LHRH-XTEN-drug conjugates is evaluated using an in vitro-based screening and selectivity assay. Each LHRH-XTEN-drug conjugate, its corresponding non-targeting XTEN-drug molecule and respective free drug control are tested in a CellTiter-Glo anti-proliferation assay against a panel of LHRH receptor positive and negative cell lines. Choice of cell lines is based on relevance to proposed clinical application and includes MCF-7, MDA-MB-231, HCC1806, HCC1937, OV-1063, EFO-21, EFO-27, NIH:OVCAR-3, BG-1, HEC-IA, HEC-1B, Ishikawa, KLE, AN-3-CA, MiaPaCa, Panc-1, rat Dunning R-3327-H, PC-82, MDA-PCa-2b, C4-2 (derivative of LNCaP), A549, A2780, UCI-107, SK-OV-3, SW 626, MFE-296. Appropriate assay conditions, including optimal cell density and incubation time, are pre-determined using the respective free drug as control. LHRH-XTEN-drug conjugates are tested as follows: cells in log-phase are collected, counted and plated at pre-determined cell density onto each well of a 96-well microtiter assay plate. Adherent cells are allowed to attach to the plate by an overnight incubation at 37° C., 5% CO2. LHRH-XTEN-drug conjugates and corresponding controls are introduced in a dose range in duplicates and plate incubated for an additional 2 to 5 days depending on cell lines used. After the appropriate incubation period, CellTiter-Glo reagent is added to each well, mixed for 2 minute on an orbital shaker. Plate is then centrifuged at 90×g and incubated at room temperature for an additional 10 minutes to stabilize the luminescent signal. Luminescence signals are then read on a luminometer & IC50s (half maximal inhibitory concentration) are calculated with GraphPad Prism or equivalent software. Quantitative comparisons of IC50s will enable ranking of the compounds' activity for inhibition of cell growth and selectivity against LHRH receptor positive versus negative cell lines.

[0627] It is expected that the results would support the finding that the LHRH-XTEN-drug conjugates will show highly-selective and potent killing of LHRH receptor positive cells but not on LHRH receptor-negative cells. This will be in contrast to the free drug moiety whereby no discrimination in the strong cytotoxicity is expected between LHRH receptor positive and negative cell lines. The XTEN-drug control without the LHRH targeting moiety is expected to yield poor cytotoxic activity. The LHRH-XTEN-drug conjugate with the most favorable activity and cell line selectivity relative to controls are further verified for LHRH receptor association by the addition of free competitive LHRH peptide in the assay and demonstrating impaired LHRH-XTEN-drug cytotoxicity.

### Example 69: In Vitro Serum Stability of LHRH-XTEN-Drug Conjugates

[0628] As a measure of drug linkage stability, LHRH-XTEN-drug conjugates are incubated independently in normal human, cynomolgus monkey and rodent plasma at 37° C. for up to 2 weeks with an aliquot removed at periodic interval and stored at −80° C. till analysis. The stability of LHRH-XTEN-drug conjugate can be assessed either by the amount of free drug released or the integrity of the LHRH-XTEN-drug conjugate over time. Free drug is quantitated with RP-HPLC and/or LC-MS/MS whereas the amount of intact LHRH-XTEN-drug conjugate is determined by a XTEN/drug and/or LHRH/drug ELISA. For RP-HPLC analysis, plasma samples are treated with organic solvents such as acetonitrile or acetone to precipitate proteins. Soluble fractions are evaporated in vacuum, redissolved in loading solutions and analyzed by RP-HPLC. Analytes are detected by UV absorption at wavelength specific for a particular drug. For example, doxorubicin is detected at 480 nm. Calibration standards are prepared by adding known amounts of free drug to corresponding plasma type and are treated in parallel with experimental samples. For LC-MS/MS analysis, plasma samples are treated with organic solvents such as acetonitrile or acetone to precipitate proteins. Soluble fractions are evaporated in vacuum, redissolved in loading solutions and analyzed by RP-HPLC. Analytes are in-line detected and quantitated by triple quadrupole tandem mass spectrometry. Parental ion-daughter ion pairs are determined experimentally for each drug. Calibration standards are prepared by adding known amounts of free drug to corresponding plasma type and is treated in parallel with experimental samples. For quantitative ELISA, optimal concentrations of antibodies for LHRH-XTEN-drug conjugate in the ELISAs are determined using criss-cross serial dilution analysis. An appropriate capture antibody recognizing one component of the conjugate is coated onto a 96-well microtiter plate by an overnight incubation at 4° C. The wells are blocked, washed and serum stability samples added to the wells, each at varying dilutions to allow optimal capture of the LHRH-XTEN-drug conjugate by the coated antibody. After washing, detection antibody recognizing another component of the conjugate is added and allowed to bind to the conjugate captured on the plate. Wells are then washed again and either streptavidin-horseradish peroxidase (complementary to biotinylated version of detection antibody) or an appropriate secondary antibody-horseradish peroxidase (complementary to non-biotinylated version of detection antibody) is then added. After appropriate incubation and a final wash step, tetramethylbenzidine (TMB) substrate is added and plate read at 450 nM. Concentrations of intact conjugate are then calculated for each time point by comparing the colorimetric response to a calibration curve prepared with LHRH-XTEN-drug in the relevant plasma type. The ½ of the conjugate in human, cyno and mouse serum is then defined using linear regression analysis of the log concentrations vs. time.

### Example 70: In Vitro Serum Stability of Folate-XTEN-Drug Conjugates

[0629] As a measure of drug linkage stability, folate-XTEN-drug conjugates are incubated independently in normal human, cynomolgus monkey and rodent plasma at 37° C. for up to 2 weeks with an aliquot removed at periodic interval and stored at −80° C. till analysis. The stability of folate-XTEN-drug conjugate can be assessed either by the amount of free drug or the integrity of the folate-XTEN-drug conjugate over time. Presence of free drug is quantitated with HPLC, LC-MS/MS and/or with the anti-proliferation assay as described in the relevant section above. The amount of intact folate-XTEN-drug conjugate is determined by a XTEN/drug and/or folate/drug ELISA. For RP-HPLC analysis, plasma samples are treated with organic solvents such as acetonitrile or acetone to precipitate proteins. Soluble fractions are evaporated in vacuum, redissolved in loading solutions and analyzed by RP-HPLC. Analytes are detected by UV absorption at wavelength specific for a particular drug. For example, doxorubicin is detected at 480 nm. Calibration standards are prepared by adding known amounts of free drug to corresponding plasma type and is treated in parallel with experimental samples. For LC-MS/MS analysis, plasma samples are treated with organic solvents such as acetonitrile or acetone to precipitate proteins. Soluble fractions are evaporated in vacuum, redissolved in loading solutions and analyzed by RP-HPLC. Analytes are in-line detected and quantitated by triple quadrupole tandem mass spectrometry. Parental ion-daughter ion pairs are determined experimentally for each drug. Calibration standards are prepared by adding known amounts of free drug to corresponding plasma type and is treated in parallel with experimental samples. When using the anti-proliferation assay as a detection method for the presence of de-conjugated free drug, folate receptor positive or negative cell line could be employed. Folic acid inhibitor is added when assessment is performed in receptor positive cell line and not required when done in receptor negative cell line. In either receptor cell type, increasing concentration of de-conjugated free drug contributes to increased cell toxicity. For quantitative ELISA, optimal concentrations of antibodies for folate-XTEN-drug conjugate in the ELISAs are determined using criss-cross serial dilution analysis. An appropriate capture antibody recognizing one component of the conjugate is coated onto a 96-well microtiter plate by an overnight incubation at 4° C. The wells are blocked, washed and serum stability samples added to the wells, each at varying dilutions to allow optimal capture of the folate-XTEN-drug conjugate by the coated antibody. After washing, detection antibody recognizing another component of the conjugate is added and allowed to bind to the conjugate captured on the plate. Wells are then washed again and either streptavidin-horseradish peroxidase (complementary to biotinylated version of detection antibody) or an appropriate secondary antibody-horseradish peroxidase (complementary to non-biotinylated version of detection antibody) is then added. After appropriate incubation and a final wash step, tetramethylbenzidine (TMB) substrate is added and plate read at 450 nM. Concentrations of intact conjugate are then calculated for each time point by comparing the colorimetric response to a calibration curve prepared with folate-XTEN-drug in the relevant plasma type. The ½ of the conjugate in human, cyno and mouse serum is then defined using linear regression analysis of the log concentrations vs. time.

### Example 71: In Vivo and Ex Vivo Imaging of LHRH-XTEN-Cy5.5 Conjugate

[0630] A Cy5.5 fluorescent tagged LHRH-XTEN conjugate molecule is used as a surrogate to investigate the targeting and biodistribution efficiency of LHRH-XTEN-drug conjugates. Experiments are carried out in nude mice bearing subcutaneous grown xenografts of LHRH receptor positive tumor cells using in vivo, followed by ex vivo, fluorescence imaging with IVIS 50 optical imaging system (Caliper Life Sciences, Hopkinton, MA). In brief, female nu/nu mice bearing LHRH receptor positive tumor cells are given a single intravenously injection of high or low dose LHRH-XTEN-Cy5.5 and corresponding doses of non-targeting Cy5.5 tagged XTEN control. Whole body scans are acquired pre-injection and then at approximately 8, 24, 48 and 72 hours post-injection on live anesthetized animals using the IVIS 50 optical imaging system. After measuring the distribution of fluorescence in the entire animal at the last time point of 72 h, tumor and healthy organs including liver, lung, heart, spleen and kidneys are excised and their fluorescence registered and processed by the imaging system. Cy5.5 excitation (615-665 nm) and emission (695-770 nm) filters are selected to match the fluorescence agents' wavelengths. Small and medium binning of the CCD chip is used and the exposure time optimized to obtain at least several thousand counts from the signals that were observable in each mouse in the image and to avoid saturation of the CCD chip. To normalize images for quantification, a background fluorescence image is acquired using background excitation and emission filters for the Cy5.5 spectral region. The intensity of fluorescence is expressed by different colors with blue color reflecting the lowest intensity and red is indicative of the highest intensity.

### Example 72: In Vivo and Ex Vivo Imaging of Folate-XTEN-Cy5.5 Conjugates

[0631] A Cy5.5 fluorescent tagged folate-XTEN molecule is used as a surrogate to investigate the targeting and biodistribution efficiency of folate-XTEN-drug conjugates. Experiments are carried out in nude mice bearing subcutaneous grown xenografts of folate receptor positive tumor cells using in vivo, followed by ex vivo, fluorescence imaging with IVIS 50 optical imaging system (Caliper Life Sciences, Hopkinton, MA). As culture media contain high folate content, folate receptor positive tumor cells to be transplanted onto these mice are grown in folate-free cell culture media containing 5-10% heat-inactivated FCS with no antibiotics. Similarly, normal rodent chow contains a high concentration of folic acid; nude mice used in this study are maintained on folate-free diet 2 weeks prior to tumor implantation and for the duration of the imaging analysis to reduce serum folate concentration. Female nu/nu mice bearing folate receptor positive tumor cells are given a single intravenously injection of high or low dose folate-XTEN-Cy5.5 and corresponding doses of non-targeting Cy5.5 tagged XTEN control. Whole body scans are acquired pre-injection and then at approximately 8, 24, 48 and 72 hours post-injection on live anesthetized animals using the IVIS 50 optical imaging system. After measuring the distribution of fluorescence in the entire animal at the last time point of 72 h, tumor and healthy organs including liver, lung, heart, spleen and kidneys are excised and their fluorescence registered and processed by the imaging system. Cy5.5 excitation (615-665 nm) and emission (695-770 nm) filters are selected to match the fluorescence agents' wavelengths. Small and medium binning of the CCD chip is used and the exposure time optimized to obtain at least several thousand counts from the signals that were observable in each mouse in the image and to avoid saturation of the CCD chip. To normalize images for quantification, a background fluorescence image is acquired using background excitation and emission filters for the Cy5.5 spectral region. The intensity of fluorescence is expressed by different colors with blue color reflecting the lowest intensity and red is indicative of the highest intensity.

### Example 73: Pharmacokinetic Analysis of LHRH-XTEN-Drug Conjugates

[0632] The in vivo pharmacokinetics of LHRH-XTEN-drug constructs is assessed using standard methods for protein compositions. Pharmacokinetics are assessed in multiple species, however mice, rats, cynomolgus monkeys, and dogs are preferred due to their common usage in predicting human pharmacokinetics. Compositions of LHRH-XTEN-drug constructs are provided in an aqueous buffer compatible with in vivo administration (for example: phosphate-buffered saline, Tris-buffered saline or Hepes-buffered saline). The compositions are administered at appropriate doses and via multiple routes: most preferably via intravenous or subcutaneous routes. Blood samples are collected at appropriate time points ranging from 0.08 to 504 hours, and processed into plasma. Plasma samples will then be analyzed for concentration of LHRH-XTEN-drug conjugates by one of a variety of methods including ELISA, HPLC and/or LC-MS/MS. ELISA analysis will be performed using a sandwich ELISA format that can recognize 2 components of the LHRH-XTEN-drug conjugate, for instance, XTEN/LHRH, XTEN/drug moiety, LHRH/drug moiety and/or XTEN/XTEN combinations. Typically antibody recognizing one component of the LHRH-XTEN-drug conjugate is coated onto wells of a 96-well microtiter plate. The wells are blocked, washed and plasma samples that have been collected at different time points are then added to the wells, each at varying dilutions, to allow capture of the conjugate by the coated antibody. Wells are then washed extensively, and bound protein detected using either a biotinylated antibody or an appropriate secondary antibody against the second LHRH-XTEN-drug conjugate component. Wells are then washed again and streptavidin-horseradish peroxidase (complementary to the biotinylated detection antibody) or a secondary antibody-horseradish peroxidase (complementary to a non biotinylated detection antibody) is then added. After appropriate incubation and a final wash step, tetramethylbenzidine (TMB) substrate is added and plate read at 450 nM. Concentrations of conjugate are then calculated for each time point by comparing the colorimetric response to a LHRH-XTEN-drug calibration curve. Pharmacokinetic parameters are calculated using the WinNonLin software package. For RP-HPLC analysis, plasma samples are treated with organic solvents such as acetonitrile or acetone to precipitate proteins. Soluble fractions are evaporated in vacuum, redissolved in loading solutions and analyzed by RP-HPLC. Analytes are detected by UV absorption at wavelength specific for a particular drug. For example, doxorubicin is detected at 480 nm. Calibration standards are prepared by adding known amounts of free drug to corresponding plasma type and are treated in parallel with experimental samples. For LC-MS/MS analysis, plasma samples are treated with organic solvents such as acetonitrile or acetone to precipitate proteins. Soluble fractions are evaporated in vacuum, redissolved in loading solutions and analyzed by RP-HPLC. Analytes are in-line detected and quantitated by triple quadrupole tandem mass spectrometry. Parental ion-daughter ion pairs are determined experimentally for each drug. Calibration standards are prepared by adding known amounts of free drug to corresponding plasma type and are treated in parallel with experimental samples. It is expected that the results would support the finding that addition of an XTEN to LHRH and drug moiety as a conjugate preparation will greatly increase the terminal half-life and enhance pharmacokinetic properties compared to targeting peptides and drug moiety not linked to XTEN. This in turn will translate into a less frequent, more convenient dosing regimen for such conjugates.

### Example 74: Pharmacokinetic Analysis of Folate-XTEN-Drug Conjugates

[0633] The in vivo pharmacokinetics of folate-XTEN-drug constructs are assessed using standard methods for protein compositions. Pharmacokinetics are assessed in multiple species, however mice, rats, cynomolgus monkeys, and dogs are preferred due to their common usage in predicting human pharmacokinetics. As normal feed contains a high concentration of folic acid (example 6 mg/kg mouse chow), animals to be used in pharmacokinetic studies of folate conjugates are maintained on folate-free diet for 2 weeks prior to study initiation and for the duration of the study. Compositions of folate-XTEN-drug constructs are typically provided in an aqueous buffer compatible with in vivo administration (for example: phosphate-buffered saline, Tris-buffered saline or Hepes-buffered saline). The compositions would be administered at appropriate doses and via multiple routes: most preferably via intravenous or subcutaneous routes. Blood samples would be collected at appropriate time points ranging from 0.08 to 504 hours, and processed into plasma. Plasma samples will then be analyzed for concentration of folate-XTEN-drug conjugates by a variety of methods including ELISA, HPLC and/or LC-MS/MS. ELISA analysis are performed using a sandwich ELISA format that can recognize 2 components of the folate-XTEN-drug conjugate, for instance, XTEN/folate, XTEN/drug moiety, folate/drug moiety and/or XTEN/XTEN combinations. Typically antibody recognizing one component of the folate-XTEN-drug conjugate is coated onto wells of a 96-well microtiter plate. The wells are blocked, washed and plasma samples that have been collected at different time points are then added to the wells, each at varying dilutions, to allow capture of the conjugate by the coated antibody. Wells are then washed extensively, and bound protein detected using either a biotinylated antibody or an appropriate secondary antibody against the second LHRH-XTEN-drug conjugate component. Wells are then washed again and streptavidin-horseradish peroxidase (complementary to the biotinylated detection antibody) or a secondary antibody-horseradish peroxidase (complementary to a non biotinylated detection antibody) is then added. After appropriate incubation and a final wash step, tetramethylbenzidine (TMB) substrate is added and plate read at 450 nM. Concentrations of conjugate are then calculated for each time point by comparing the colorimetric response to a folate-XTEN-drug calibration curve. Pharmacokinetic parameters are calculated using the WinNonLin software package. For RP-HPLC analysis, plasma samples are treated with organic solvents such as acetonitrile or acetone to precipitate proteins. Soluble fractions are evaporated in vacuum, redissolved in loading solutions and analyzed by RP-HPLC. Analytes are detected by UV absorption at wavelength specific for a particular drug. For example, doxorubicin is detected at 480 nm. Calibration standards are prepared by adding known amounts of free drug to corresponding plasma type and are treated in parallel with experimental samples. For LC-MS/MS analysis, plasma samples are treated with organic solvents such as acetonitrile or acetone to precipitate proteins. Soluble fractions are evaporated in vacuum, redissolved in loading solutions and analyzed by RP-HPLC. Analytes are in-line detected and quantitated by triple quadrupole tandem mass spectrometry. Parental ion-daughter ion pairs are determined experimentally for each drug. Calibration standards are prepared by adding known amounts of free drug to corresponding plasma type and are treated in parallel with experimental samples. It is expected that the results would support the finding that addition of an XTEN to folate and drug moiety as a conjugate preparation will greatly increase the terminal half-life and enhance pharmacokinetic properties compared to targeting peptides and drug moiety not linked to XTEN. This in turn will translate into a less frequent, more convenient dosing regimen for such conjugates.

### Example 75: In Vivo Efficacy and Toxicity Analysis of LHRH-XTEN-Drug Conjugates

[0634] LHRH-XTEN-drug conjugate is intended for targeted delivery of highly potent toxin to LHRH receptor positive tumor cells. As such, the in vivo pharmacologic activity of LHRH-XTEN-drug constructs can be assessed using human tumor cell expressing LHRH receptor transplanted onto nude mice. Prior to beginning the efficacy study, an initial assessment in nude mice is carried out to establish the maximum tolerated dose (MTD) of the LHRH-XTEN-drug candidates. The MTD, the highest dose that is tolerated by the animal for the study duration, will then be used to calculate the dose range for the efficacy and toxicity study in the standard xenograft model. Briefly, the MTD experiment are carried out with 5 mice per group evaluating the intravenous administration of LHRH-XTEN-drug conjugates at various dose level, interval and duration. The starting MTD dose and number of dose groups required are based on scientific literature, knowledge of the targeting LHRH moiety, the nature of the drug moiety conjugated, toxicological properties of closely related compounds, and data from the initial pharmacokinetic studies (see section above). Standard MTD parameters such as reduction in body weight, food and water consumption and signs of piloerection, hunched, behavior patterns, respiratory pattern, tremors, convulsions, prostration and self-mutilation is carefully monitored on a daily basis. The highest dose of LHRH-XTEN-drug that does not cause unacceptable toxicity is assigned as the MTD. The tumor xenograft study will include 3 to 4 dosing levels of LHRH-XTEN-drug conjugate and will depend on the results from the MTD study; with other parameters depending on the tumor cell line chosen. Example 69 describes examples of tumor lines that can be used in the xenograft study. Thus an appropriate number of LHRH receptor positive cells from the relevant human tumor line are injected subcutaneously and allowed to form tumors, the size of which is measured with calipers and the volume calculated as 0.5×L×W², where L=measurement of longest axis in millimeters and W=measurement of axis perpendicular to L in millimeters. Following randomization of mice containing tumor volume in the desired size range into groups of 8-10 animals, vehicle control, free drug control and LHRH-XTEN-drug conjugate are administered intravenously at the chosen doses and interval. Cessation or regression of tumor growth is determined through measuring the tumor size and hence volume at selected time points with calipers. Body weights and food consumption are measured every 1 to 2 days to assess gross toxicity. Survival of animals is monitored daily. At the end of the study, all animals are sacrificed and clinical pathology and histopathology on major organs are performed. Targeted cytotoxins are among the most promising strategies for the selective elimination of malignant cells. It is anticipated that the results would support the finding that the LHRH-XTEN-drug conjugate will produce an excellent therapeutic index as exhibited by potent efficacy and low systemic toxicity. In contrast, the non-LHRH targeted free drug dosed at equimolar doses will not only be less potent but more highly toxic. The vehicle control is expected to display uncontrolled tumor growth and severe toxicity.

### Example 76: In Vivo Efficacy and Toxicity Analysis of Folate-XTEN-Drug Conjugates

[0635] Folate-XTEN-drug conjugate is intended for targeted delivery of highly potent toxin to folate receptor positive tumor cells. As such, the in vivo pharmacologic activity of folate-XTEN-drug constructs can be assessed using human tumor cell expressing folate receptor xenograft onto nude mice. Prior to beginning the efficacy study, an initial assessment in nude mice are carried out to establish the maximum tolerated dose (MTD) of the folate-XTEN-drug candidates. The MTD, the highest dose that is tolerated by the animal for the study duration, will then be used to calculate the dose range for the efficacy and toxicity study in the standard xenograft model. As normal rodent chow contains a high concentration of folic acid (6 mg/kg chow), mice to be used in these studies are maintained on folate-free diet for 2 weeks prior to study initiation and for the duration of the study. The MTD experiment is carried out with 5 mice per group evaluating the intravenous administration of folate-XTEN-drug conjugates at various dose level, interval and duration. The starting MTD dose and number of dose groups required is based on scientific literature, knowledge of the targeting folate moiety, the nature of the drug moiety conjugated, toxicological properties of closely related compounds, and data from the initial pharmacokinetic studies (see section above). Standard MTD parameters such as reduction in body weight, food and water consumption and signs of piloerection, hunched, behavior patterns, respiratory pattern, tremors, convulsions, prostration and self-mutilation is carefully monitored on a daily basis. The highest dose of folate-XTEN-drug that does not cause unacceptable toxicity is assigned as the MTD. The tumor xenograft study will include 3 to 4 dosing levels of folate-XTEN-drug and will depend on the results from the MTD; with other parameters depending on the tumor cell line chosen. Example 69 describes examples of tumor lines that can be used in the xenograft study. To reduce folate content, folate receptor positive tumor cells to be transplanted onto nude mice are grown in folate-free cell culture media containing 5-10% heat-inactivated fetal calf serum with no antibiotics. Similarly, to reduce serum folate concentration, mice used in the xenograft studies are maintained on folate-free diet 2 weeks prior to tumor implantation and for the duration of the study. Thus an appropriate number of folate receptor positive cells from the relevant line are injected subcutaneously and allowed to form tumors, the size of which is measured with calipers and the volume calculated as 0.5×L×W², where L=measurement of longest axis in millimeters and W=measurement of axis perpendicular to L in millimeters. Following randomization of mice containing tumor volume in the desired size range into groups of 8-10 animals, vehicle control, free drug control and folate-XTEN-drug are administered intravenously at the chosen doses and interval. Cessation or regression of tumor growth is determined through measuring the tumor size and hence volume at selected time points with calipers. Body weights and food consumption are measured every 1 to 2 days to assess gross toxicity. Survival of animals is monitored daily. At the end of study, all animals are sacrificed and clinical pathology and histopathology on major organs are performed. Targeted cytotoxins are among the most promising strategies for the selective elimination of malignant cells. It is anticipated that targeted chemotherapeutic folate-XTEN-drug conjugate will be more effective and less toxic than free cytotoxic drug alone on folate receptor positive tumors.

### Example 76: Clinical Applications of LHRH-XTEN-Drug Conjugates

[0636] Targeted chemotherapy is a modern approach aimed at increasing the efficacy of systemic chemotherapy and reducing its side effects. Brentuximab vedotin (Adcentris), approved for Hodgkin lymphoma and systemic anaplastic large cell lymphoma is a leading example of effective toxin-targeted therapy. LHRH is a peptide that functions in reproductive organs. Because its receptors are particularly concentrated on certain tumors but are not expressed in most normal tissue, LHRH receptor is an ideal target for selective destruction of malignant tumors. Indeed, ˜52% of breast, ˜80% of ovarian and endometrial, and ˜85% of prostate cancer specimens is targetable via the LHRH receptor. Of note, LHRH-dependent therapies would be especially useful for triple negative breast tumors, which do not overexpress estrogen or progesterone receptors or HER2 and are therefore unsuitable for treatment with many available targeted drugs. Patients with advanced endometrial, ovarian, or prostate cancer often have particularly poor outcomes, as these malignancies can be prone to recurrence and/or resistant to current treatments. In support of this, clinical studies with AEZS-108, a targeted doxorubicin analog of LHRH, indicate that each of these cancer types is susceptible to LHRH-based therapies. Fusion of a XTEN carrying 21 copy of LHRH to a XTEN bearing ≥3 drug molecules to create a targeted peptide-drug conjugate is expected to have vastly improved therapeutic index and half-life that will enable dosing at levels way below MTD, reduce dosing frequency and cost (reduced drug required per dose).

[0637] Clinical evaluation of LHRH-XTEN-drug composition are conducted in patients suffering from advanced breast, endometrial, ovarian, and prostate or bladder cancers. Clinical trials are designed such that the efficacy and advantages of the LHRH-XTEN-drug conjugate can be verified in humans. Such studies in patients would comprise three phases. First, a Phase I safety and pharmacokinetics study is conducted to determine the maximum tolerated dose (MTD) and to characterize the dose-limiting toxicity, pharmacokinetics and preliminary pharmacodynamics in humans. These initial studies are performed in patients with metastatic or unresectable cancers and for which standard curative or palliative measures could not be used or were no longer effective or tolerated. To enhance treatment efficacy, LHRH receptor positive status would be an enrollment criteria; determined by immunohistochemistry of primary tumors or metastatic specimens and/or by LHRH-targeted molecular imaging agent. The scheme of the phase I study is to use single escalating doses of LHRH-XTEN-drug conjugate and measure the biochemical, PK, and clinical parameters. This would permit the determination of the MTD and establish the threshold and maximum concentrations in dosage and in circulating drug that constitute the therapeutic window to be used in subsequent Phase II and Phase III trials. It also defines potential toxicities and adverse events to be tracked in future studies.

[0638] Phase II clinical studies of human patients are independently conducted in LHRH receptor positive advanced (stage 3 or 4) or recurrent breast, endometrial, ovarian, and prostate or bladder cancer patients. The trial evaluates the efficacy and safety of LHRH-XTEN-drug conjugate alone and in combination with a current chemotherapy employed in that specific indication. Patients receive intravenously administered LHRH-XTEN-drug clinical candidate at a dose level and regimen pre-determined in Phase I with or without the standard chemo-agent A control arm comprising of the chemo-agent plus placebo is included. The primary endpoint is response rate as defined by the Response Evaluation Criteria in Solid Tumors (RECIST). Secondary endpoints include safety and tolerability, time-to-progression and overall survival.

[0639] A phase III efficacy and safety study is structured to replicate or modify the phase II trial design in LHRH receptor positive advanced (resistant, recurrent) breast, endometrial, ovarian, and prostate or bladder cancer patients depending on the phase II clinical observations. Refinement of patient enrollment criteria, further patient stratification (example LHRH receptor expression level), dosage, regimen, status of standard chemo-agent etc. could be further adjusted. The primary endpoint is progression-free-survival, as measured by RECIST, in patients defined as LHRH receptor positive. The trial is statistically powered for overall survival as a secondary endpoint with projected enrollment in excess of 400 patients. Incidence of adverse events, serious adverse event and deaths is assessed.

[0640] It is anticipated that LHRH-XTEN-drug candidate will demonstrate anticancer activity without cardiotoxicity even in these highly-pretreated patient populations.

### Example 76: Clinical Applications of Folate-XTEN-Drug Conjugates

[0641] Targeted chemotherapy is a modern approach aimed at increasing the efficacy of systemic chemotherapy and reducing its side effects. Brentuximab vedotin (Adcentris), approved for Hodgkin lymphoma and systemic anaplastic large cell lymphoma is a leading example of effective toxin targeted therapy. Folate, also known as folic acid, vitamin B₉, is a vital nutrient required by all living cells for nucleotide biosynthesis and function as cofactor in certain biological pathways. It is especially important in aiding rapid cell division and growth. As such, the folate receptor is a focus for the development of therapies to treat fast dividing malignancy in particular ovarian cancer and non-small cell lung carcinoma. Some ovarian tumor type is likely to recur after initial successes with surgery and platinum-based chemotherapy, to which the regrowth can become resistant to available therapies. While folate receptor expression is negligible in normal ovary, ˜90% of epithelial ovarian cancers overexpress the folate receptor, as do many lung adenocarinomas, thereby opening the possibility of directed therapies. In support of this, clinical studies with EC-145, a targeted vinca alkaloid analog of folate, indicated that platinum-resistant ovarian cancer and non-small cell lung carcinoma are susceptible to folate-based therapies. Fusion of a XTEN carrying 2:1 copy of folate to a XTEN bearing >3 drug molecules to create a targeted peptide-drug conjugate is expected to have vastly improved therapeutic index and half-life that will enable dosing at levels way below maximum tolerated dose (MTD), reduce dosing frequency and cost (reduced drug required per dose).

[0642] Clinical evaluation of folate-XTEN-drug composition is conducted in patients with relapsed or refractory advanced tumors or specifically in patients suffering from platinum-resistant ovarian cancer and non-small cell lung carcinoma who have failed numerous chemotherapies. Clinical trials are designed such that the efficacy and advantages of the folate-XTEN-drug conjugate can be verified in humans. Such studies in patients would comprise three phases. First, a Phase I safety and pharmacokinetics study is conducted to determine the MTD and to characterize the dose-limiting toxicity, pharmacokinetics and preliminary pharmacodynamics in humans. These initial studies are performed in patients with relapsed or refractory advanced tumors and for which standard curative or palliative measures could not be used or were no longer effective or tolerated. To enhance treatment efficacy, folate receptor positive status is an enrollment criteria, determined by immunohistochemistry of primary tumors or metastatic specimens and/or by folate-targeted molecular imaging agent. The scheme of the phase I study is to use single escalating doses of folate-XTEN-drug conjugate and measure the biochemical, PK, and clinical parameters. This would permit the determination of the MTD and establish the threshold and maximum concentrations in dosage and in circulating drug that constitute the therapeutic window to be used in subsequent Phase II and Phase III trials. It also defines potential toxicities and adverse events to be tracked in future studies.

[0643] Phase II clinical studies of human patients are independently conducted in folate receptor positive platinum-resistant ovarian cancer patient population; non-small cell lung carcinoma patients having failed numerous chemotherapies; and patients suffering from relapsed or refractory advanced tumors. The trial evaluates the efficacy and safety of folate-XTEN-drug conjugate alone and in combination with a current chemotherapy employed in the specific indication. Patients receive intravenously administered folate-XTEN-drug conjugate at a dose level and regimen pre-determined in Phase I with or without the standard chemo-agent. A control arm comprising of the chemo-agent plus placebo is included. The primary endpoint is response rate as defined by the Response Evaluation Criteria in Solid Tumors (RECIST). Secondary endpoints would include safety and tolerability, time-to-progression and overall survival.

[0644] A phase III efficacy and safety study is structured to replicate or modify the phase II trial design in folate receptor positive platinum-resistant ovarian cancer patients; non-small cell lung carcinoma patients; and advanced tumor relapsed or refractory patients depending on the phase II clinical observations. Refinement of patient enrollment criteria, further patient stratification (example folate receptor expression level), dosage, regimen, status of standard chemo-agent etc., is further adjusted. The primary endpoint is progression-free-survival, as measured by RECIST, in patients defined as folate receptor positive. The trial will also be statistically powered for overall survival as a secondary endpoint with projected enrollment in excess of 400 patients. Incidence of adverse events, serious adverse event and deaths is also assessed.

[0645] It is anticipated that folate-XTEN-drug candidate will demonstrate anticancer activity without severe toxicity even in these highly pretreated patient populations.

TABLE 52
XTEN-cleavage sequence-affinity tag Polypeptide Sequences

| | | SEQ |
|---|---|---|
| Construct | Amino Acid Sequence | ID NO: |
| AC710 | APTTAGAGRPRPRPRPRPRPRPRPRPRPRPGRGSPGSPAGSPTSTE | 1149 |
| | EGTSESATPESGPGTSTEPSEGSAPGSPAGSPTSTEEGTSTEPSEGS | |
| | APGTSTEPSEGSAPGTSESATPESGPGSEPATSGSETPGSEPATSG | |
| | SETPGSPAGSPTSTEEGTSESATPESGPGTSTEPSEGSAPGTSTEPS | |
| | EGSAPGSPAGSPTSTEEGTSTEPSEGSAPGTSTEPSEGSAPGTSES | |
| | ATPESGPGTSTEPSEGSAPGTSESATPESGPGSEPATSGSETPGTS | |
| | TEPSEGSAPGTSTEPSEGSAPGTSESATPESGPGTSESATPESGPGS | |
| | PAGSPTSTEEGTSESATPESGPGSEPATSGSETPGTSESATPESGP | |
| | GTSTEPSEGSAPGTSTEPSEGSAPGTSTEPSEGSAPGTSTEPSEGS | |
| | APGTSTEPSEGSAPGTSTEPSEGSAPGSPAGSPTSTEEGTSTEPSE | |
| | GSAPGTSESATPESGPGSEPATSGSETPGTSESATPESGPGSEPAT | |
| | SGSETPGTSESATPESGPGTSTEPSEGSAPGTSESATPESGPGSPA | |
| | GSPTSTEEGSPAGSPTSTEEGSPAGSPTSTEEGTSESATPESGPGTS | |
| | TEPSEGSAPGTSESATPESGPGSEPATSGSETPGTSESATPESGPGS | |
| | EPATSGSETPGTSESATPESGPGTSTEPSEGSAPGSPAGSPTSTEE | |
| | GTSESATPESGPGSEPATSGSETPGTSESATPESGPGSPAGSPTSTE | |
| | EGSPAGSPTSTEEGTSTEPSEGSAPGTSESATPESGPGTSESATPES | |
| | GPGTSESATPESGPGSEPATSGSETPGSEPATSGSETPGSPAGSPT | |
| | STEEGTSTEPSEGSAPGTSTEPSEGSAPGSEPATSGSETPGTSESAT | |
| | PESGPGTSTEPSEGSAPGRHHHHHHHH | |
| AC698 | ANTPVSGNLKVEFYNSNPSDTTNSINPQFKVTNTGSSAIDLSKLT | 1150 |
| | LRYYYTVDGQKDQTFWADHAAIIGSNGSYNGITSNVKGTFVKM | |
| | SSSTNNADTYLEISFTGGTLEPGAHVQIQGRFAKNDWSNYTQSN | |
| | DYSFKSASQFVEWDQVTAYLNGVLVWGKEPGGSVVGSGSGSG | |
| | RGSPGSPAGSPTSTEEGTSESATPESGPGTSTEPSEGSAPGSPAGS | |
| | PTSTEEGTSTEPSEGSAPGTSTEPSEGSAPGTSESATPESGPGSEPA | |
| | TSGSETPGSEPATSGSETPGSPAGSPTSTEEGTSESATPESGPGTST | |
| | EPSEGSAPGTSTEPSEGSAPGSPAGSPTSTEEGTSTEPSEGSAPGTS | |
| | TEPSEGSAPGTSESATPESGPGTSTEPSEGSAPGTSESATPESGPGS | |
| | EPATSGSETPGTSTEPSEGSAPGTSTEPSEGSAPGTSESATPESGP | |
| | GTSESATPESGPGSPAGSPTSTEEGTSESATPESGPGSEPATSGSE | |
| | TPGTSESATPESGPGTSTEPSEGSAPGTSTEPSEGSAPGTSTEPSEG | |
| | SAPGTSTEPSEGSAPGTSTEPSEGSAPGTSTEPSEGSAPGSPAGSP | |
| | TSTEEGTSTEPSEGSAPTAEAAGKPGTAEAAGTSESATPESGPGS | |
| | EPATSGSETPGTSESATPESGPGSEPATSGSETPGTSESATPESGP | |
| | GTSTEPSEGSAPGTSESATPESGPGSPAGSPTSTEEGSPAGSPTSTE | |
| | EGSPAGSPTSTEEGTSESATPESGPGTSTEPSEGSAPGTSESATPES | |
| | GPGSEPATSGSETPGTSESATPESGPGSEPATSGSETPGTSESATP | |
| | ESGPGTSTEPSEGSAPGSPAGSPTSTEEGTSESATPESGPGSEPATS | |
| | GSETPGTSESATPESGPGSPAGSPTSTEEGSPAGSPTSTEEGTSTEP | |
| | SEGSAPGTSESATPESGPGTSESATPESGPGTSESATPESGPGSEP | |
| | ATSGSETPGSEPATSGSETPGSPAGSPTSTEEGTSTEPSEGSAPGT | |
| | STEPSEGSAPGSEPATSGSETPGTSESATPESGPGTSTEPSEGSAPG | |
| | KATHHHHHHHH | |
| AC815 | KNPEQAEEQAEEQREETRPRPRPRPRPRPRPRPRPRPRPSASRSA | 1151 |
| | GSPTAEAAGCGTAEAAGSPAGSPTSTEEGTSESATPESGPGTSTE | |
| | PSEGSAPGSPAGSPTSTEEGTSTEPSEGSAPGTSTEPSEGSAPGTSE | |
| | SATPESGPGSEPATSGSETPGSEPATSGSETPGSPAGSPTSTEEGTS | |
| | ESATPESGPGTSTEPSEGSAPGTSTEPSEGSAPGSPAGSPTSTEEG | |
| | TSTEPSEGSAPGTSTEPSEGSAPGTSESATPESGPGTSTEPSEGSAP | |
| | GTSESATPESGPGSEPATSGSETPGTSTEPSEGSAPGTSTEPSEGS | |
| | APGTSESATPESGPGTSESATPESGPGSPAGSPTSTEEGTSESATP | |
| | ESGPGSEPATSGSETPGTSESATPESGPGTSTEPSEGSAPGTSTEPS | |
| | EGSAPGTSTEPSEGSAPGTSTEPSEGSAPGTSTEPSEGSAPGTSTE | |
| | PSEGSAPGSPAGSPTSTEEGTSTEPSEGSAPGTSESATPESGPGSEP | |
| | ATSGSETPGTSESATPESGPGSEPATSGSETPGTSESATPESGPGT | |
| | STEPSEGSAPGTSESATPESGPGSPAGSPTSTEEGSPAGSPTSTEEG | |
| | SPAGSPTSTEEGTSESATPESGPGTSTEPSEGSAPGTSESATPESGP | |
| | GSEPATSGSETPGTSESATPESGPGSEPATSGSETPGTSESATPES | |
| | GPGTSTEPSEGSAPGSPAGSPTSTEEGTSESATPESGPGSEPATSG | |
| | SETPGTSESATPESGPGSPAGSPTSTEEGSPAGSPTSTEEGTSTEPS | |
| | EGSAPGTSESATPESGPGTSESATPESGPGTSESATPESGPGSEPA | |
| | TSGSETPGSEPATSGSETPGSPAGSPTSTEEGTSTEPSEGSAPGTST | |
| | EPSEGSAPGSEPATSGSETPGTSESATPESGPGTSTEPSEGSAPSAS | |
| | RSAHHHHHHHH | |
| AC816 | KNPEQAEEQAEEQREETRPRPRPRPRPRPRPRPRPRPRPSASRSA | 1152 |
| | GSPTAEAAGCGTAEAAGSPAGSPTSTEEGTSESATPESGPGTSTE | |
| | PSEGSAPGSPAGSPTSTEEGTSTEPSEGSAPGTSTEPSEGSAPGTSE | |
| | SATPESGPGSEPATSGSETPGSEPATSGSETPGSPAGSPTSTEEGTS | |
| | ESATPESGPGTSTEPSEGSAPGTSTEPSEGSAPGSPAGSPTSTEEG | |
| | TSTEPSEGSAPGTSTEPSEGSAPGTSESATPESGPGTSTEPSEGSAP | |
| | GTSESATPESGPGSEPATSGSETPGTSTEPSEGSAPGTSTEPSEGS | |
| | APGTSESATPESGPGTSESATPESGPGSPAGSPTSTEEGTSESATP | |
| | ESGPGSEPATSGSETPGTSESATPESGPGTSTEPSEGSAPGTSTEPS | |
| | EGSAPGTSTEPSEGSAPGTSTEPSEGSAPGTSTEPSEGSAPGTSTE | |
| | PSEGSAPGSPAGSPTSTEEGTSTEPSEGSAPTAEAAGCGTAEAAG | |
| | TSESATPESGPGSEPATSGSETPGTSESATPESGPGSEPATSGSETP | |
| | GTSESATPESGPGTSTEPSEGSAPGTSESATPESGPGSPAGSPTSTE | |
| | EGSPAGSPTSTEEGSPAGSPTSTEEGTSESATPESGPGTSTEPSEGS | |
| | APGTSESATPESGPGSEPATSGSETPGTSESATPESGPGSEPATSG | |
| | SETPGTSESATPESGPGTSTEPSEGSAPGSPAGSPTSTEEGTSESAT | |
| | PESGPGSEPATSGSETPGTSESATPESGPGSPAGSPTSTEEGSPAG | |
| | SPTSTEEGTSTEPSEGSAPGTSESATPESGPGTSESATPESGPGTSE | |
| | SATPESGPGSEPATSGSETPGSEPATSGSETPGSPAGSPTSTEEGTS | |
| | TEPSEGSAPGTSTEPSEGSAPGSEPATSGSETPGTSESATPESGPG | |
| | TSTEPSEGSAPTAEAAGCGTAEAASASRSAHHHHHHHH | |
| AC763 | KNPEQAEEQAEEQREETRPRPRPRPRPRPRPRPRPRPRPSASRSA | 1153 |
| | GSPTAEAAGCGTAEAAGTSESATPESGPGSEPATSGSETPGTSES | |
| | ATPESGPGTSTEPSEGSAPGTSESATPESGPGSPAGSPTSTEEGSP | |
| | AGSPTSTEEGSPAGSPTSTEEGTSESATPESGPGTSTEPSEGSAPG | |
| | TSESATPESGPGSEPATSGSETPGTSESATPESGPGSEPATSGSETP | |
| | GTSESATPESGPGTSTEPSEGSAPTAEAAGCGTAEAAGSPAGSPT | |
| | STEEGTSESATPESGPGSEPATSGSETPGTSESATPESGPGSPAGSP | |
| | TSTEEGSPAGSPTSTEEGTSTEPSEGSAPGTSESATPESGPGTSESA | |
| | TPESGPGTSESATPESGPGSEPATSGSETPGSEPATSGSETPGSPA | |
| | GSPTSTEEGTSTEPSEGSAPGTSTEPSEGSAPGSEPATSGSETPTAE | |
| | AAGCGTAEAASASRSAHHHHHHHH | |
| AC767 | KNPEQAEEQAEEQREETRPRPRPRPRPRPRPRPRPRPRPSASRSA | 1154 |
| | GSPTGPGSEPATSGSETPGTSESATPESGPGSEPATSGSETPGTSES | |
| | ATPESGPGTSTEPSEGSAPGSPAGSPTSTEEGTSESATPESGPGSEP | |
| | ATSGSETPGTSESATPESGPGSPAGSPTSTEEGSPAGSPTSTEEGT | |
| | STEPSEGSAPGTSESATPESGPGTSESATPESGPGTSESATPESGPG | |
| | SEPATSGSETPGSEPATSGSETPGSPAGSPTSTEEGTSTEPSEGSAP | |
| | GTSTEPSEGSAPGSEPATSGSETPGTSESATPESGPGTSTEPSEGS | |
| | APSASRSAHHHHHHHH | |
| AC769 | KNPEQAEEQAEEQREETRPRPRPRPRPRPRPRPRPRPRPSASRSA | 1155 |
| | GSPTAEAAGCGTAEAAPGSEPATSGSETPGTSESATPESGPGSEP | |
| | ATSGSETPGTAEAAGCGTAEAASTEPSEGSAPGTSESATPESGPG | |
| | SPAGSPTSTEEGSPATAEAAGCGTAEAASPTSTEEGTSESATPES | |
| | GPGTSTEPSEGSAPGTSESATTAEAAGCGTAEAASETPGTSESAT | |
| | PESGPGSEPATSGSETPGTSESATPESGTAEAAGCGTAEAAGSPA | |
| | GSPTSTEEGTSESATPESGPGSEPATSGSETPGTTAEAAGCGTAE | |
| | AAAGSPTSTEEGSPAGSPTSTEEGTSTEPSEGSAPGTSESTAEAAG | |
| | CGTAEAATPESGPGTSESATPESGPGSEPATSGSETPGSEPATSGT | |
| | AEAAGCGTAEAATEEGTSTEPSEGSAPGTSTEPSEGSAPGSEPAT | |
| | SGSETPTAEAAGCGTAEAASASRSAHHHHHHHH | |
| AC771 | KNPEQAEEQAEEQREETRPRPRPRPRPRPRPRPRPRPRPSASRSA | 1156 |
| | GSPGSPAGSPTSTEEGTSESATPESGPGTSTEPSEGSAPGSPAGSP | |
| | TSTEEGTSTEPSEGSAPGTSTEPSEGSAPGTSESATPESGPGSEPAT | |
| | SGSETPGSEPATSGSETPGSPAGSPTSTEEGTSESATPESGPGTSTE | |
| | PSEGSAPGTSTEPSEGSAPGSPAGSPTSTEEGTSTEPSEGSAPGTST | |
| | EPSEGSAPGTSESATPESGPGTSTEPSEGSAPGTSESATPESGPGSE | |
| | PATSGSETPGTSTEPSEGSAPGTSTEPSEGSAPGTSESATPESGPG | |
| | TSESATPESGPGSPAGSPTSTEEGTSESATPESGPGSEPATSGSETP | |
| | GTSESATPESGPGTSTEPSEGSAPGTSTEPSEGSAPGTSTEPSEGS | |
| | APGTSTEPSEGSAPGTSTEPSEGSAPGTSTEPSEGSAPGSPAGSPT | |
| | STEEGTSTEPSEGSAPTAEAAGCGTAEAAPGSEPATSGSETPGTS | |
| | ESATPESGPGSEPATSGSETPGTAEAAGCGTAEAASTEPSEGSAP | |
| | GTSESATPESGPGSPAGSPTSTEEGSPATAEAAGCGTAEAASPTS | |
| | TEEGTSESATPESGPGTSTEPSEGSAPGTSESATTAEAAGCGTAE | |
| | AASETPGTSESATPESGPGSEPATSGSETPGTSESATPESGTAEAA | |
| | GCGTAEAAGSPAGSPTSTEEGTSESATPESGPGSEPATSGSETPG | |
| | TTAEAAGCGTAEAAAGSPTSTEEGSPAGSPTSTEEGTSTEPSEGS | |
| | APGTSESTAEAAGCGTAEAATPESGPGTSESATPESGPGSEPATS | |
| | GSETPGSEPATSGTAEAAGCGTAEAATEEGTSTEPSEGSAPGTST | |
| | EPSEGSAPGSEPATSGSETPTAEAAGCGTAEAASASRSAHHHHH | |
| | HHH | |
| AC817 | KKQEQEEKKAEEQREETRPRPRPRPRPRPRPRPRPRPRPSASRSA | 1157 |
| | GSPGSPAGSPTSTEEGTSESATPESGPGTSTEPSEGSAPGSPAGSP | |
| | TSTEEGTSTEPSEGSAPGTSTEPSEGSAPGTSESATPESGPGSEPAT | |
| | SGSETPGSEPATSGSETPGSPAGSPTSTEEGTSESATPESGPGTES | |
| | ASRSAHHHHHHHH | |
| AC818 | KKQEQEEKKAEEQREETRPRPRPRPRPRPRPRPRPRPRPSASRSA | 1158 |
| | GSPGSPAGSPTSTEEGTSESATPESGPGTSTEPSEGSAPGSPAGSP | |
| | TSTEEGTSTEPSEGSAPGTSTEPSEGSAPGTSESATPESGPGSEPAT | |
| | SGSETPGSEPATSGSETPGSPAGSPTSTEEGTSESATPESGPGTSTE | |
| | PSEGSAPGTSTEPSEGSAPGSPAGSPTSTEEGTSTEPSEGSAPGTST | |
| | EPSEGSAPGTSESATPESGPGTSTEPSEGSAPGTSESATPESGPGSE | |
| | PATSGSETPGTSTEPSEGSAPGTSTEPSEGSAPGTSESATPESGPG | |
| | TSESATPESGPGSPAGSPTSTEEGTSESATPESGPGSEPATSGSETP | |
| | GTSESATPESGPGTSTEPSEGSAPGTSTEPSEGSAPGTSTEPSEGS | |
| | APGTSTEPSEGSAPGTSTEPSEGSAPGTSTEPSEGSAPGSPAGSPT | |
| | STEEGTESASRSAHHHHHHHH | |
| AC780 | KKQEQEEKKAEEQREETRPRPRPRPRPRPRPRPRPRPRPSASRSA | 1159 |
| | GSPTEEGTSESATPESGPGSEPATSGSETPGTSESATPESGPGTSTE | |
| | PSEGSAPGTSTEPSEGSAPGTSTEPSEGSAPGTSTEPSEGSAPGTST | |
| | EPSEGSAPGTSTEPSEGSAPGSPAGSPTSTEEGTSTEPSEGSAPGTS | |
| | ESATPESGPGSEPATSGSETPGTSESATPESGPGSEPATSGSETPG | |
| | TSESATPESGPGTSTEPSEGSAPGTSESATPESGPGSPAGSPTSTEE | |
| | GSPAGSPTSTEEGSPAGSPTSTEEGTSESATPESGPGTSTEPSEGS | |
| | APGTSESATPESGPGSEPATSGSETPGTSESATPESGPGSEPATSG | |
| | SETPGTSESATPESGPGTSTEPSEGSAPGSPAGSPTSTEEGTSESAT | |
| | PESGPGSEPATSGSETPGTSESATPESGPGSPAGSPTSTEEGSPAG | |
| | SPTSTEEGTSTEPSEGSAPGTSESATPESGPGTSESATPESGPGTSE | |
| | SATPESGPGSEPATSGSETPGSEPATSGSETPGSPAGSPTSTEEGTS | |
| | TEPSEGSAPGTSTEPSEGSAPGSEPATSGSETPGTSESATPESGPG | |
| | TSTEPSEGSAPSASRSAHHHHHHHH | |
| AC785 | KKQEQEEKKAEEQREETRPRPRPRPRPRPRPRPRPRPRPSASRSA | 1160 |
| | GSPTEGTSTEPSEGSAPGTSESTAEAAGCGTAEAATPESGPGTSE | |
| | SATPESGPGSEPATSGSETPGSEPATSGTAEAAGCGTAEAATEEG | |
| | TSTEPSEGSAPGTSTEPSEGSAPGSEPATSGSETPTAEAAGCGTAE | |
| | AASASRSAHHHHHHHH | |
| AC765 | KNPEQAEEQAEEQREETRPRPRPRPRPRPRPRPRPRPRPSASRSA | 1161 |
| | GSPTPGTSESATPESGPGSEPATSGSETPGTSESATPESGPGSEPAT | |
| | SGSETPGTSESATPESGPGTSTEPSEGSAPGTSESATPESGPGSPA | |
| | GSPTSTEEGSPAGSPTSTEEGSPAGSPTSTEEGTSESATPESGPGTS | |
| | TEPSEGSAPGTSESATPESGPGSEPATSGSETPGTSESATPESGPGS | |
| | EPATSGSETPGTSESATPESGPGTSTEPSEGSAPGSPAGSPTSTEE | |
| | GTSESATPESGPGSEPATSGSETPGTSESATPESGPGSPAGSPTSTE | |
| | EGSPAGSPTSTEEGTSTEPSEGSAPGTSESATPESGPGTSESATPES | |
| | GPGTSESATPESGPGSEPATSGSETPGSEPATSGSETPGSPAGSPT | |
| | STEEGTSTEPSEGSAPGTSTEPSEGSAPGSEPATSGSETPTAEAAG | |
| | CGTAEAASASRSAHHHHHHHH | |
| AC766 | KNPEQAEEQAEEQREETRPRPRPRPRPRPRPRPRPRPRPSASRSA | 1162 |
| | GSPTGSEPATSGSETPGTSESATPESGPGSEPATSGSETPGTSESA | |
| | TPESGPGTSTEPSEGSAPGTSESATPESGPGSPAGSPTSTEEGSPA | |
| | GSPTSTEEGSPAGSPTSTEEGTSESATPESGPGTSTEPSEGSAPGTS | |
| | ESATPESGPGSEPATSGSETPGTSESATPESGPGSEPATSGSETPG | |
| | TSESATPESGPGTSTEPSEGSAPTAEAAGCGTAEAAGSPAGSPTS | |
| | TEEGTSESATPESGPGSEPATSGSETPGTSESATPESGPGSPAGSP | |
| | TSTEEGSPAGSPTSTEEGTSTEPSEGSAPGTSESTAEAAGCGTAE | |
| | AATPESGPGTSESATPESGPGSEPATSGSETPGSEPATSGSETPGS | |
| | PAGSPTSTEEGTSTEPSEGSAPGTSTEPSEGSAPGSEPATSGSETPT | |
| | AEAAGCGTAEAASASRSAHHHHHHHH | |
| AC768 | KNPEQAEEQAEEQREETRPRPRPRPRPRPRPRPRPRPRPSASRSA | 1163 |
| | GSPTPGTSESATPESGPGSEPATSGSETPGTSESATPESGPGSEPAT | |
| | SGSETPGTSESATPESGPGTSTEPSEGSAPGTSESATPESGPGSPA | |
| | GSPTSTEEGSPAGSPTSTEEGSPAGSPTSTEEGTSESATPESGPGTS | |
| | TEPSEGSAPGTSESATPESGPGSEPATSGSETPGTSESATPESGPGS | |
| | EPATSGSETPGTSESATPESGPGTSTEPSEGSAPGSPAGSPTSTEE | |
| | GTSESATPESGPGSEPATSGSETPGTSESATPESGPGSPAGSPTSTE | |
| | EGSPAGSPTSTEEGTSTEPSEGSAPGTSESTAEAAGCGTAEAATP | |
| | ESGPGTSESATPESGPGSEPATSGSETPGSEPATSGTAEAAGCGT | |
| | AEAATEEGTSTEPSEGSAPGTSTEPSEGSAPGSEPATSGSETPTAE | |
| | AAGCGTAEAASASRSAHHHHHHHH | |
| AC786 | KKQEQEEKKAEEQREETRPRPRPRPRPRPRPRPRPRPRPSASRSA | 1164 |
| | GSPGSPAGSPTSTEEGTSESATPESGPGTSTEPSEGSAPGSPAGSP | |
| | TSTEEGTSTEPSEGSAPGTSTEPSEGSAPGTSESATPESGPGSEPAT | |
| | SGSETPGSEPATSGSETPGSPAGSPTSTEEGTSESATPESGPGTSTE | |
| | PSEGSAPGTSTEPSEGSAPGSPAGSPTSTEEGTSTEPSEGSAPGTST | |
| | EPSEGSAPGTSESATPESGPGTSTEPSEGSAPGTSESATPESGPGSE | |
| | PATSGSETPGTSTEPSEGSAPGTSTEPSEGSAPGTSESATPESGPG | |
| | TSESATPESGPGSPAGSPTSTEEGTSESATPESGPGSEPATSGSETP | |
| | GTSESATPESGPGTSTEPSEGSAPGTSTEPSEGSAPGTSTEPSEGS | |
| | APGTSTEPSEGSAPGTSTEPSEGSAPGTSTEPSEGSAPGSPAGSPT | |
| | STEEGTSTEPSEGSAPGTSESATPESGPGSEPATSGSETPGTSESAT | |
| | PESGPGSEPATSGSETPGTSESATPESGPGTSTEPSEGSAPGTSESA | |
| | TPESGPGSPAGSPTSTEEGSPAGSPTSTEEGSPAGSPTSTEEGTSES | |
| | ATPESGPGTSTEPSEGSAPGTSESATPESGPGSEPATSGSETPGTS | |
| | ESATPESGPGSEPATSGSETPGTSESATPESGPGTSTEPSEGSAPGS | |
| | PAGSPTSTEEGTSESATPESGPGSEPATSGSETPGTSESATPESGP | |
| | GSPAGSPTSTEEGSPAGSPTSTEEGTSTEPSEGSAPGTSESATPES | |
| | GPGTSESATPESGPGTSESATPESGPGSEPATSGSETPGSEPATSG | |
| | SETPGSPAGSPTSTEEGTSTEPSEGSAPGTSTEPSEGSAPGSEPATS | |
| | GSETPGTSESATPESGPGTESASRSAHHHHHHHH | |
| AC792 | KKQEQEEKKAEEQREETRPRPRPRPRPRPRPRPRPRPRPSASRSA | 1165 |
| | GSPGSTSSTAESPGPGSTSSTAESPGPGCTSESPSGTAPGSTSSTAE | |
| | SPGPGSTSSTAESPGPGTSTPESGSASPGSTSCSPSGEAPGTSPSGE | |
| | SSTAPGSTSESPSGTAPGSTSESPSGTAPETSPSGESCTAPGSTSAS | |
| | RSAHHHHHHHH | |
| AC793 | KKQEQEEKKAEEQREETRPRPRPRPRPRPRPRPRPRPRPSASRSA | 1166 |
| | GSPGTPGSGTASSSPGSSTPSGATGSPGCAGSGTASSSPGSSTPSG | |
| | ATGSPGTPGSGTASSSPGSSTPSGATGSPGSSTCSGATGSPGSSPS | |
| | ASTGTGPGSSPSASTGTGPGASPGTSSTGSPGTPGSGTACSSPGSS | |
| | SASRSAHHHHHHHH | |
| AC798 | KKQEQEEKKAEEQREETRPRPRPRPRPRPRPRPRPRPRPSASRSA | 1167 |
| | GSPGSPAGSPTSTEEGTSESATPESGPGTSTEPSEGSAPGSPAGSP | |
| | TSTEEGTSTEPSEGSAPGTSTEPSEGSAPGTSESATPESGPGSEPAT | |
| | SGSETPGSEPATSGSETPGSPAGSPTSTEEGTSESATPESGPGTSTE | |
| | PSEGSAPGTSTEPSEGSAPGSPAGSPTSTEEGTSTEPSEGSAPGTST | |
| | EPSEGSAPGTSESATPESGPGTSTEPSEGSAPGTSESATPESGPGSE | |
| | PATSGSETPGTSTEPSEGSAPGTSTEPSEGSAPGTSESATPESGPG | |
| | TSESATPESGPGSPAGSPTSTEEGTSESATPESGPGSEPATSGSETP | |
| | GTSESATPESGPGTSTEPSEGSAPGTSTEPSEGSAPGTSTEPSEGS | |
| | APGTSTEPSEGSAPGTSTEPSEGSAPGTSTEPSEGSAPGSPAGSPT | |
| | STEEGTSTEPSEGSAPGTSESATPESGPGSEPATSGSETPGTSESAT | |
| | PESGPGSEPATSGSETPGTSESATPESGPGTSTEPSEGSAPGTSESA | |
| | TPESGPGSPAGSPTSTEEGSPAGSPTSTEEGSPAGSPTSTEEGTSES | |
| | ATPESGPGTSTEPSEGSAPGTSESATPESGPGSEPATSGSETPGTS | |
| | ESATPESGPGSEPATSGSETPGTSESATPESGPGTSTEPSEGSAPGS | |
| | PAGSPTSTEEGTSESATPESGPGSEPATSGSETPGTSESATPESGP | |
| | GSPAGSPTSTEEGSPAGSPTSTEEGTSTEPSEGSAPGTSESATPES | |
| | GPGTSESATPESGPGTSESATPESGPGSEPATSGSETPGSEPATSG | |
| | SETPGSPAGSPTSTEEGTSTEPSEGSAPGTSTEPSEGSAPGSEPATS | |
| | GSETPGTSESATPESGPGTESASKSAHHHHHHHH | |
| AC809 | KNPEQAEEQAEEQREETRPRPRPRPRPRPRPRPRPRPRPSASRSA | 1168 |
| | GSPTGPGSEPATSGSETPGTSESATPESGPGSEPATSGSETPGTSES | |
| | ATPESGPGTSTEPSEGSAPGSPAGSPTSTEEGTSESATPESGPGSEP | |
| | ATSGSETPGTSESATPESGPGSPAGSPTSTEEGSPAGSPTSTEEGT | |
| | STEPSEGSAPGTSESATPESGPGTSESATPESGPGTSESATPESGPG | |
| | SEPATSGSETPGSEPATSGSETPGSPAGSPTSTEEGTSTEPSEGSAP | |
| | GTSTEPSEGSAPGSEPATSGSETPGTSESATPESGPGTSTACSEGS | |
| | APSASRSAHHHHHHHH | |
| AC810 | KNPEQAEEQAEEQREETRPRPRPRPRPRPRPRPRPRPRPSASRSA | 1169 |
| | GSPTGPGSEPATSGSETPGTSESATPESGPGSEPATSGSETPGTSES | |
| | ATPESGPGTSTEPSEGSAPGSPAGSPTSTEEGTSESATPESGPGSEP | |
| | ATSGSETPGTSESATPESGPGSPAGSPTSTEEGSPAGSPTSTEEGT | |
| | STEPSEGSAPGTSESATPESGPGTSESATPESGPGTSESATPESGPG | |
| | SEPATSGSETPGSEPATSGSETPGSPAGSPTSTEEGTSTEPSEGSAP | |
| | GTSTEPSEGSAPGSEPATSGSETPGTSESATPESGPGTSTEPSEGSC | |
| | ASASRSAHHHHHHHH | |
| AC831 | KKQEQEEKKAEEQREETRPRPRPRPRPRPRPRPRPRPRPSASRSA | 1170 |
| | GSPGSTSSTAESPGPGSTSSTAESPGPGSTSESPSGTAPGSTSSTAE | |
| | SPGPGSTSSTAESPGPGTSTPESGSASPGSTSESPSGTAPGTSPSGE | |
| | SSTAPGSTSESPSGTAPGSTSESPSGTAPGTSPSGESSTAPGSTSES | |
| | PSGTAPGSTSESPSGTAPGTSPSGESSTAPGSTSESPSGTAPGSTSE | |
| | SPSGTAPGSTSESPSGTAPGTSTPESGSASPGSTSESPSGTAPGTST | |
| | PESGSASPGSTSSTAESPGPGSTSSTAESPGPGTSTPESGSASPGTS | |
| | TPESGSASPGSTSESPSGTAPGTSTPESGSASPGTSTPESGSASPGS | |
| | TSESPSGTAPGSTSESPSGTAPGSTSESPSGTAPGSTSSTAESPGPG | |
| | TSTPESGSASPGTSTPESGSASPGSTSESPSGTAPGSTSESPSGTAP | |
| | GTSTPESGSASPGSTSESPSGTAPGSTSESPSGTAPGTSTPESGSAS | |
| | PGTSPSGESSTAPGSTSSTAESPGPGTSPSGESSTAPGSTSSTAESP | |
| | GPGTSTPESGSASPGSTSESPSGTAPGSTSSTAESPGPGTSTPESGS | |
| | ASPGTSTPESGSASPGSTSSTAESPGPGTSPSGESSTAPGTSTPESG | |
| | SASPGSTSESPSGTAPGSTSESPSGTAPGTSTPESGSASPGTSPSGE | |
| | SSTAPGSTSSTAESPGPGTSPSGESSTAPGSTSSTAESPGPGSTSST | |
| | AESPGPGTSPSGESSTAPGSTSESPSGTAPGSTSESPSGTAPGTSTP | |
| | ESGSASPGSTSESPSGTAPGSTSESPSGTAPGTSTPESGSASPGSTS | |
| | ESPSGTAPGSTSESPSGTAPGSTSESPSGTAPGSTSSTAESPGPGTS | |
| | PSGESSTAPGTSSASRSAHHHHHHHH | |
| AC832 | KKQEQEEKKAEEQREETRPRPRPRPRPRPRPRPRPRPRPSASRSA | 1171 |
| | GSPGASPGTSSTGSPGSSPSASTGTGPGSSPSASTGTGPGTPGSGT | |
| | ASSSPGSSTPSGATGSPGSSPSASTGTGPGASPGTSSTGSPGTPGS | |
| | GTASSSPGSSTPSGATGSPGTPGSGTASSSPGASPGTSSTGSPGAS | |
| | PGTSSTGSPGTPGSGTASSSPGSSTPSGATGSPGASPGTSSTGSPG | |
| | TPGSGTASSSPGSSTPSGATGSPGSSPSASTGTGPGSSPSASTGTG | |
| | PGSSTPSGATGSPGSSTPSGATGSPGASPGTSSTGSPGASPGTSST | |
| | GSPGASPGTSSTGSPGTPGSGTASSSPGASPGTSSTGSPGASPGTS | |
| | STGSPGASPGTSSTGSPGSSPSASTGTGPGTPGSGTASSSPGASPG | |
| | TSSTGSPGASPGTSSTGSPGASPGTSSTGSPGSSTPSGATGSPGSST | |
| | PSGATGSPGASPGTSSTGSPGTPGSGTASSSPGSSTPSGATGSPGS | |
| | STPSGATGSPGSSTPSGATGSPGSSPSASTGTGPGASPGTSSTGSP | |
| | GASPGTSSTGSPGTPGSGTASSSPGASPGTSSTGSPGASPGTSSTG | |
| | SPGASPGTSSTGSPGASPGTSSTGSPGTPGSGTASSSPGSSTPSGA | |
| | TGSPGTPGSGTASSSPGSSTPSGATGSPGTPGSGTASSSPGSSTPS | |
| | GATGSPGSSTPSGATGSPGSSPSASTGTGPGSSPSASTGTGPGASP | |
| | GTSSTGSPGTPGSGTASSSPGSSTPSGATGSPGSSPSASTGTGPGS | |
| | SPSASTGTGPGASPGTSSTGSPGASPGTSSTGSPGSSTPSGATGSP | |
| | GSSPSASTGTGPGASPGTSSTGSPGSSPSASTGTGPGTPGSGTASS | |
| | SPGSSTPSGATGSPGSSTPSGATGSPGASSASRSAHHHHHHHH | |
| AC819 | KKQEQEEKKAEEQREETRPRPRPRPRPRPRPRPRPRPRPSASRSA | 1172 |
| | GSPGSCAGSPTSTEEGTSESACPESGPGTSTEPSEGSCPGSPAGSP | |
| | TSTEEGTCTEPSEGSAPGTSTEPCSGSAPGTSESATPESCPGSEPA | |
| | TSGSETPGSCPATSGSETPGSPAGSCTSTEEGTSESATPESCPGTE | |
| | SASRSAHHHHHHHH | |
| AC820 | KNPEQAEEQAEEQREETRPRPRPRPRPRPRPRPRPRPRPSASRSA | 1173 |
| | GSPTGCGSEPATSGSETPGTSESATPESGPGSEPATSGSETPGTSE | |
| | SATPESGPGTSTEPSEGSAPGSPAGSPTSTEEGTSESATPESGPGSE | |
| | PATSGSETPGTSESATPESGPGSPAGSPTSTEEGSPAGSPTSTEEG | |
| | TSCTPSEGSAPGTSESATPESGPGTSESATPESGPGTSESATPESGP | |
| | GSEPATSGSETPGSEPATSGSETPGSPAGSPTSTEEGTSTEPSEGS | |
| | APGTSTEPSEGSAPGSEPATSGSETPGTSESATPESGPGTSTEPSC | |
| | GSAPSASRSAHHHHHHHH | |
| AC821 | KNPEQAEEQAEEQREETRPRPRPRPRPRPRPRPRPRPRPSASRSA | 1174 |
| | GSPTGCGSEPATSGSETPGTSESATPESGPGSEPATSGSCTPGTSE | |
| | SATPESGPGTSTEPSEGSAPGSPAGSPCSTEEGTSESATPESGPGS | |
| | EPATSGSETPGTSESCTPESGPGSPAGSPTSTEEGSPAGSPTSTEEG | |
| | TSCTPSEGSAPGTSESATPESGPGTSESATPESGPGCSESATPESGP | |
| | GSEPATSGSETPGSEPATSGSETCGSPAGSPTSTEEGTSTEPSEGS | |
| | APGTSTEPSEGCAPGSEPATSGSETPGTSESATPESGPGTSTEPSC | |
| | GSAPSASRSAHHHHHHHH | |

The application's sequence listing, which the Patent Office published only in electronic form, follows.

SEQUENCE LISTING (1179 sequences)

SEQ ID NO: 1 - protein, 13 aa, synthetic construct
  REGION 1..13: note = Description of Artificial Sequence: Synthetic peptide
  VAR_SEQ 10: note = Ser or Arg
KNPEQAEEQXEET

SEQ ID NO: 2 - protein, 13 aa, synthetic construct
  REGION 1..13: note = Description of Artificial Sequence: Synthetic peptide
  MOD_RES 10: note = Ser or Arg
ANPEQAEEQXEET

SEQ ID NO: 3 - protein, 17 aa, synthetic construct
  REGION 1..17: note = Description of Artificial Sequence: Synthetic peptide
  MOD_RES 14: note = Ser or Arg
KNPEQAEEQAEEQXEET

SEQ ID NO: 4 - protein, 17 aa, synthetic construct
  REGION 1..17: note = Description of Artificial Sequence: Synthetic peptide
  MOD_RES 2: note = Lys or Asn
  MOD_RES 3: note = Lys, Asn, Thr, Gln, His, Pro, Glu, Asp, Ala, Arg or Ser
  MOD_RES 14: note = Ser or Arg
KXXEQAEEQAEEQXEET

SEQ ID NO: 5 - protein, 17 aa, synthetic construct
  REGION 1..17: note = Description of Artificial Sequence: Synthetic peptide
  MOD_RES 2: note = Lys or Asn
  MOD_RES 3..12: note = Lys, Asn, Thr, Gln, His, Pro, Glu, Asp, Ala, Arg or Ser
  MOD_RES 14: note = Ser or Arg
KXXXXXXXXXXXQXEET

SEQ ID NO: 6 - protein, 17 aa, synthetic construct
  REGION 1..17: note = Description of Artificial Sequence: Synthetic peptide
  MOD_RES 2: note = Lys or Asn
  MOD_RES 3..9: note = Lys, Asn, Thr, Gln, His, Pro, Glu, Asp, Ala, Arg or Ser
  MOD_RES 14: note = Ser or Arg
KXXXXXXXXAEEQXEET

SEQ ID NO: 7 - protein, 17 aa, synthetic construct
  REGION 1..17: note = Description of Artificial Sequence: Synthetic peptide
  MOD_RES 2: note = Lys or Asn
  MOD_RES 3: note = Lys, Asn, Thr, Gln, His, Pro, Glu, Asp, Ala, Arg or Ser
  MOD_RES 7..9: note = Lys, Asn, Thr, Gln, His, Pro, Glu, Asp, Ala, Arg or Ser
KXXEQEXXXAEEQREET

SEQ ID NO: 8 - protein, 17 aa, synthetic construct
  REGION 1..17: note = Description of Artificial Sequence: Synthetic peptide
  MOD_RES 2: note = Lys or Asn
  MOD_RES 3: note = Lys, Asn, Thr, Gln, His, Pro, Glu, Asp, Ala, Arg or Ser
  MOD_RES 7..9: note = Lys, Asn, Thr, Gln, His, Pro, Glu, Asp, Ala, Arg or Ser
  MOD_RES 13..17: note = Lys, Asn, Thr, Gln, His, Pro, Glu, Asp, Ala, Arg or Ser
KXXEQEXXXAEEXXXXX

SEQ ID NO: 9 - protein, 21 aa, synthetic construct
  REGION 1..21: note = Description of Artificial Sequence: Synthetic peptide
  MOD_RES 14: note = Ala or Ser
  MOD_RES 15: note = Lys, Gln or Glu
  MOD_RES 16: note = Ala or Ser
  MOD_RES 17: note = Lys, Gln or Glu
KKQEQEKEQAEEQXXXXREET

SEQ ID NO: 10 - protein, 25 aa, synthetic construct
  REGION 1..25: note = Description of Artificial Sequence: Synthetic peptide
  MOD_RES 14: note = Ala or Ser
  MOD_RES 15: note = Lys, Gln or Glu
  MOD_RES 16: note = Ala or Ser
  MOD_RES 17: note = Lys, Gln or Glu
  MOD_RES 18: note = Ala or Ser
  MOD_RES 19: note = Lys, Gln or Glu
  MOD_RES 20: note = Ala or Ser
  MOD_RES 21: note = Lys, Gln or Glu
KKQEQEKEQAEEQXXXXXXXXREET

SEQ ID NO: 11 - protein, 21 aa, synthetic construct
  REGION 1..21: note = Description of Artificial Sequence: Synthetic peptide
  MOD_RES 14..17: note = Any naturally-occurring L-amino acid
KKQEQEKEQAEEQXXXXREET

SEQ ID NO: 12-13 - skipped (2 entries)

SEQ ID NO: 14 - protein, 37 aa, synthetic construct
  REGION 1..37: note = Description of Artificial Sequence: Synthetic polypeptide
  MOD_RES 2: note = Lys or Asn
  MOD_RES 14: note = Ala or Ser
  MOD_RES 15: note = Lys, Gln or Glu
  MOD_RES 16: note = Ala or Ser
  MOD_RES 17: note = Lys, Gln or Glu
  MOD_RES 18: note = Ala or Ser
  MOD_RES 19: note = Lys, Gln or Glu
  MOD_RES 20: note = Ala or Ser
  MOD_RES 21: note = Lys, Gln or Glu
  MOD_RES 22: note = Ala or Ser
  MOD_RES 23: note = Lys, Gln or Glu
  MOD_RES 24: note = Ala or Ser
  MOD_RES 25: note = Lys, Gln or Glu
  MOD_RES 26: note = Ala or Ser
  MOD_RES 27: note = Lys, Gln or Glu
  MOD_RES 28: note = Ala or Ser
  MOD_RES 29: note = Lys, Gln or Glu
  MOD_RES 30: note = Ala or Ser
  MOD_RES 31: note = Lys, Gln or Glu
  MOD_RES 32: note = Ala or Ser
  MOD_RES 33: note = Lys, Gln or Glu
  REGION 14..33: note = misc_feature - This region may encompass 0-10 "Xaa Xaa" repeating units
  MOD_RES 34: note = Ser or Arg
KXQEQEKEQAEEQXXXXXXXXXXXXXXXXXXXXXEET

SEQ ID NO: 15 - protein, 46 aa, synthetic construct
  REGION 1..46: note = Description of Artificial Sequence: Synthetic polypeptide
  MOD_RES 2: note = Lys or Asn
  MOD_RES 3..22: note = Lys, Asn, Thr, Gln, His, Pro, Glu, Asp, Ala, Arg or Ser
  REGION 3..22: note = misc_feature - This region may encompass 5-20 residues
  MOD_RES 23: note = Ala or Ser
  MOD_RES 24: note = Lys, Gln or Glu
  MOD_RES 25: note = Ala or Ser
  MOD_RES 26: note = Lys, Gln or Glu
  MOD_RES 27: note = Ala or Ser
  MOD_RES 28: note = Lys, Gln or Glu
  MOD_RES 29: note = Ala or Ser
  MOD_RES 30: note = Lys, Gln or Glu
  MOD_RES 31: note = Ala or Ser
  MOD_RES 32: note = Lys, Gln or Glu
  MOD_RES 33: note = Ala or Ser
  MOD_RES 34: note = Lys, Gln or Glu
  MOD_RES 35: note = Ala or Ser
  MOD_RES 36: note = Lys, Gln or Glu
  MOD_RES 37: note = Ala or Ser
  MOD_RES 38: note = Lys, Gln or Glu
  MOD_RES 39: note = Ala or Ser
  MOD_RES 40: note = Lys, Gln or Glu
  MOD_RES 41: note = Ala or Ser
  MOD_RES 42: note = Lys, Gln or Glu
  REGION 23..42: note = misc_feature - This region may encompass 0-10 "Xaa Xaa" repeating units
  MOD_RES 43: note = Ser or Arg
KXXXXXXXXXXXXXXXXXXXXXXXXXXXXXXXXXXXXXXXXXXEET

SEQ ID NO: 16 - protein, 36 aa, synthetic construct
  REGION 1..36: note = Description of Artificial Sequence: Synthetic polypeptide
  MOD_RES 2: note = Lys or Asn
  MOD_RES 3..22: note = Lys, Asn, Thr, Gln, His, Pro, Glu, Asp, Ala, Arg or Ser
  REGION 3..22: note = misc_feature - This region may encompass 5-20 residues
  MOD_RES 23..32: note = Any naturally-occurring L-amino acid
  REGION 23..32: note = misc_feature - This region may encompass 0-10 residues
  MOD_RES 33: note = Ser or Arg
KXXXXXXXXXXXXXXXXXXXXXXXXXXXXXXXXEET

SEQ ID NO: 17 - protein, 13 aa, synthetic construct
  REGION 1..13: note = Description of Artificial Sequence: Synthetic peptide
RPRPRPRPRPRPR

SEQ ID NO: 18 - protein, 6 aa, synthetic construct
  REGION 1..6: note = Description of Artificial Sequence: Synthetic 6xHis tag
HHHHHH

SEQ ID NO: 19 - protein, 23 aa, synthetic construct
  REGION 1..23: note = Description of Artificial Sequence: Synthetic peptide
RPRPRPRPRPRPRPRPRPRPRPR

SEQ ID NO: 20 - protein, 8 aa, synthetic construct
  REGION 1..8: note = Description of Artificial Sequence: Synthetic 8xHis tag
HHHHHHHH

SEQ ID NO: 21 - protein, 6 aa, synthetic construct
  REGION 1..6: note = Description of Artificial Sequence: Synthetic peptide
SASRSA

SEQ ID NO: 22 - protein, 6 aa, synthetic construct
  REGION 1..6: note = Description of Artificial Sequence: Synthetic peptide
SASKSA

SEQ ID NO: 23 - protein, 6 aa, synthetic construct
  REGION 1..6: note = Description of Artificial Sequence: Synthetic peptide
  MOD_RES 4: note = Arg or Lys
SASXSA

SEQ ID NO: 24 - protein, 5 aa, synthetic construct
  REGION 1..5: note = Description of Artificial Sequence: Synthetic peptide
  MOD_RES 3: note = Any amino acid
LPXTG

SEQ ID NO: 25 - protein, 6 aa, synthetic construct
  REGION 1..6: note = Description of Artificial Sequence: Synthetic peptide
HCKFWW

SEQ ID NO: 26 - protein, 12 aa, synthetic construct
  REGION 1..12: note = Description of Artificial Sequence: Synthetic peptide
GESPGGSSGSES

SEQ ID NO: 27 - protein, 12 aa, synthetic construct
  REGION 1..12: note = Description of Artificial Sequence: Synthetic peptide
GSEGSSGPGESS

SEQ ID NO: 28 - protein, 12 aa, synthetic construct
  REGION 1..12: note = Description of Artificial Sequence: Synthetic peptide
GSSESGSSEGGP

SEQ ID NO: 29 - protein, 12 aa, synthetic construct
  REGION 1..12: note = Description of Artificial Sequence: Synthetic peptide
GSGGEPSESGSS

SEQ ID NO: 30 - protein, 12 aa, synthetic construct
  REGION 1..12: note = Description of Artificial Sequence: Synthetic peptide
GSPAGSPTSTEE

SEQ ID NO: 31 - protein, 12 aa, synthetic construct
  REGION 1..12: note = Description of Artificial Sequence: Synthetic peptide
GSEPATSGSETP

SEQ ID NO: 32 - protein, 12 aa, synthetic construct
  REGION 1..12: note = Description of Artificial Sequence: Synthetic peptide
GTSESATPESGP

SEQ ID NO: 33 - protein, 12 aa, synthetic construct
  REGION 1..12: note = Description of Artificial Sequence: Synthetic peptide
GTSTEPSEGSAP

SEQ ID NO: 34 - protein, 12 aa, synthetic construct
  REGION 1..12: note = Description of Artificial Sequence: Synthetic peptide
GSTSESPSGTAP

SEQ ID NO: 35 - protein, 12 aa, synthetic construct
  REGION 1..12: note = Description of Artificial Sequence: Synthetic peptide
GTSTPESGSASP

SEQ ID NO: 36 - protein, 12 aa, synthetic construct
  REGION 1..12: note = Description of Artificial Sequence: Synthetic peptide
GTSPSGESSTAP

SEQ ID NO: 37 - protein, 12 aa, synthetic construct
  REGION 1..12: note = Description of Artificial Sequence: Synthetic peptide
GSTSSTAESPGP

SEQ ID NO: 38 - protein, 12 aa, synthetic construct
  REGION 1..12: note = Description of Artificial Sequence: Synthetic peptide
GTPGSGTASSSP

SEQ ID NO: 39 - protein, 12 aa, synthetic construct
  REGION 1..12: note = Description of Artificial Sequence: Synthetic peptide
GSSTPSGATGSP

SEQ ID NO: 40 - protein, 12 aa, synthetic construct
  REGION 1..12: note = Description of Artificial Sequence: Synthetic peptide
GSSPSASTGTGP

SEQ ID NO: 41 - protein, 12 aa, synthetic construct
  REGION 1..12: note = Description of Artificial Sequence: Synthetic peptide
GASPGTSSTGSP

SEQ ID NO: 42 - protein, 12 aa, synthetic construct
  REGION 1..12: note = Description of Artificial Sequence: Synthetic peptide
GEPAGSPTSTSE

SEQ ID NO: 43 - protein, 12 aa, synthetic construct
  REGION 1..12: note = Description of Artificial Sequence: Synthetic peptide
GTGEPSSTPASE

SEQ ID NO: 44 - protein, 12 aa, synthetic construct
  REGION 1..12: note = Description of Artificial Sequence: Synthetic peptide
GSGPSTESAPTE

SEQ ID NO: 45 - protein, 12 aa, synthetic construct
  REGION 1..12: note = Description of Artificial Sequence: Synthetic peptide
GSETPSGPSETA

SEQ ID NO: 46 - protein, 12 aa, synthetic construct
  REGION 1..12: note = Description of Artificial Sequence: Synthetic peptide
GPSETSTSEPGA

SEQ ID NO: 47 - protein, 12 aa, synthetic construct
  REGION 1..12: note = Description of Artificial Sequence: Synthetic peptide
GSPSEPTEGTSA

SEQ ID NO: 48 - protein, 12 aa, synthetic construct
  REGION 1..12: note = Description of Artificial Sequence: Synthetic peptide
GSGASEPTSTEP

SEQ ID NO: 49 - protein, 12 aa, synthetic construct
  REGION 1..12: note = Description of Artificial Sequence: Synthetic peptide
GSEPATSGTEPS

SEQ ID NO: 50 - protein, 12 aa, synthetic construct
  REGION 1..12: note = Description of Artificial Sequence: Synthetic peptide
GTSEPSTSEPGA

SEQ ID NO: 51 - protein, 12 aa, synthetic construct
  REGION 1..12: note = Description of Artificial Sequence: Synthetic peptide
GTSTEPSEPGSA

SEQ ID NO: 52 - protein, 12 aa, synthetic construct
  REGION 1..12: note = Description of Artificial Sequence: Synthetic peptide
GSTAGSETSTEA

SEQ ID NO: 53 - protein, 12 aa, synthetic construct
  REGION 1..12: note = Description of Artificial Sequence: Synthetic peptide
GSETATSGSETA

SEQ ID NO: 54 - protein, 12 aa, synthetic construct
  REGION 1..12: note = Description of Artificial Sequence: Synthetic peptide
GTSESATSESGA

SEQ ID NO: 55 - protein, 12 aa, synthetic construct
  REGION 1..12: note = Description of Artificial Sequence: Synthetic peptide
GTSTEASEGSAS

SEQ ID NO: 56 - protein, 42 aa, synthetic construct
  REGION 1..42: note = Description of Artificial Sequence: Synthetic polypeptide
GAPGSPAGSPTSTEEGTSESATPESGPGSEPATSGSETPASS

SEQ ID NO: 57 - protein, 42 aa, synthetic construct
  REGION 1..42: note = Description of Artificial Sequence: Synthetic polypeptide
TEPSEGSAPGSPAGSPTSTEEGTSESATPESGPGSEPATSGS

SEQ ID NO: 58 - protein, 42 aa, synthetic construct
  REGION 1..42: note = Description of Artificial Sequence: Synthetic polypeptide
PAGSPTSTEEGTSTEPSEGSAPGTSESATPESGPGSEPATSG

SEQ ID NO: 59 - protein, 42 aa, synthetic construct
  REGION 1..42: note = Description of Artificial Sequence: Synthetic polypeptide
SEPATSGSETPGTSESATPESGPGTSTEPSEGSAPGSPAGSP

SEQ ID NO: 60 - protein, 42 aa, synthetic construct
  REGION 1..42: note = Description of Artificial Sequence: Synthetic polypeptide
GAPSPSASTGTGPGTPGSGTASSSPGSSTPSGATGSPGPSGP

SEQ ID NO: 61 - protein, 42 aa, synthetic construct
  REGION 1..42: note = Description of Artificial Sequence: Synthetic polypeptide
GPGTPGSGTASSSPGSSTPSGATGSPGSSPSASTGTGPGASP

SEQ ID NO: 62 - protein, 42 aa, synthetic construct
  REGION 1..42: note = Description of Artificial Sequence: Synthetic polypeptide
SPSASTGTGPGASPGTSSTGSPGTPGSGTASSSPGSSTPSGA

SEQ ID NO: 63 - protein, 42 aa, synthetic construct
  REGION 1..42: note = Description of Artificial Sequence: Synthetic polypeptide
SASTGTGPGASPGTSSTGSPGTPGSGTASSSPGSSTPSGATG

SEQ ID NO: 64 - protein, 48 aa, synthetic construct
  REGION 1..48: note = Description of Artificial Sequence: Synthetic polypeptide
MAEPAGSPTSTEEGTPGSGTASSSPGSSTPSGATGSPGASPGTSSTGS

SEQ ID NO: 65 - protein, 48 aa, synthetic construct
  REGION 1..48: note = Description of Artificial Sequence: Synthetic polypeptide
MAEPAGSPTSTEEGASPGTSSTGSPGSSTPSGATGSPGSSTPSGATGS

SEQ ID NO: 66 - protein, 144 aa, synthetic construct
  REGION 1..144: note = Description of Artificial Sequence: Synthetic polypeptide
GSEPATSGSETPGTSESATPESGPGSEPATSGSETPGSPAGSPTSTEEGTSTEPSEGSAPGSEPATSGSETPGSEPATSGSETPGSEPATSGSETPGTSTEPSEGSAPGTSESATPESGPGSEPATSGSETPGTSTEPSEGSAP

SEQ ID NO: 67 - protein, 144 aa, synthetic construct
  REGION 1..144: note = Description of Artificial Sequence: Synthetic polypeptide
SPAGSPTSTEEGTSESATPESGPGTSTEPSEGSAPGSPAGSPTSTEEGTSTEPSEGSAPGTSTEPSEGSAPGTSESATPESGPGSEPATSGSETPGSEPATSGSETPGSPAGSPTSTEEGTSESATPESGPGTSTEPSEGSAPG

SEQ ID NO: 68 - protein, 144 aa, synthetic construct
  REGION 1..144: note = Description of Artificial Sequence: Synthetic polypeptide
TSTEPSEGSAPGSPAGSPTSTEEGTSTEPSEGSAPGTSTEPSEGSAPGTSESATPESGPGTSTEPSEGSAPGTSESATPESGPGSEPATSGSETPGTSTEPSEGSAPGTSTEPSEGSAPGTSESATPESGPGTSESATPESGPG

SEQ ID NO: 69 - protein, 144 aa, synthetic construct; identical to SEQ ID NO: 68
  REGION 1..144: note = Description of Artificial Sequence: Synthetic polypeptide

SEQ ID NO: 70 - protein, 144 aa, synthetic construct
  REGION 1..144: note = Description of Artificial Sequence: Synthetic polypeptide
SPAGSPTSTEEGTSESATPESGPGSEPATSGSETPGTSESATPESGPGTSTEPSEGSAPGTSTEPSEGSAPGTSTEPSEGSAPGTSTEPSEGSAPGTSTEPSEGSAPGTSTEPSEGSAPGSPAGSPTSTEEGTSTEPSEGSAPG

SEQ ID NO: 71 - protein, 144 aa, synthetic construct; identical to SEQ ID NO: 70
  REGION 1..144: note = Description of Artificial Sequence: Synthetic polypeptide

SEQ ID NO: 72 - protein, 144 aa, synthetic construct
  REGION 1..144: note = Description of Artificial Sequence: Synthetic polypeptide
TSESATPESGPGSEPATSGSETPGTSESATPESGPGSEPATSGSETPGTSESATPESGPGTSTEPSEGSAPGTSESATPESGPGSPAGSPTSTEEGSPAGSPTSTEEGSPAGSPTSTEEGTSESATPESGPGTSTEPSEGSAPG

SEQ ID NO: 73 - protein, 144 aa, synthetic construct; identical to SEQ ID NO: 72
  REGION 1..144: note = Description of Artificial Sequence: Synthetic polypeptide

SEQ ID NO: 74 - protein, 144 aa, synthetic construct
  REGION 1..144: note = Description of Artificial Sequence: Synthetic polypeptide
TSESATPESGPGSEPATSGSETPGTSESATPESGPGSEPATSGSETPGTSESATPESGPGTSTEPSEGSAPGSPAGSPTSTEEGTSESATPESGPGSEPATSGSETPGTSESATPESGPGSPAGSPTSTEEGSPAGSPTSTEEG

SEQ ID NO: 75 - protein, 144 aa, synthetic construct
  REGION 1..144: note = Description of Artificial Sequence: Synthetic polypeptide
TSTEPSEGSAPGTSESATPESGPGTSESATPESGPGTSESATPESGPGSEPATSGSETPGSEPATSGSETPGSPAGSPTSTEEGTSTEPSEGSAPGTSTEPSEGSAPGSEPATSGSETPGTSESATPESGPGTSTEPSEGSAPG

SEQ ID NO: 76 - protein, 144 aa, synthetic construct
  REGION 1..144: note = Description of Artificial Sequence: Synthetic polypeptide
GTSTPESGSASPGTSPSGESSTAPGTSPSGESSTAPGSTSSTAESPGPGSTSESPSGTAPGSTSSTAESPGPGTSPSGESSTAPGTSTPESGSASPGSTSSTAESPGPGTSPSGESSTAPGTSPSGESSTAPGTSPSGESSTAP

SEQ ID NO: 77 - protein, 144 aa, synthetic construct
  REGION 1..144: note = Description of Artificial Sequence: Synthetic polypeptide
SGTASSSPGSSTPSGATGSPGTPGSGTASSSPGSSTPSGATGSPGSSTPSGATGSPGSSPSASTGTGPGSSPSASTGTGPGASPGTSSTGSPGTPGSGTASSSPGSSTPSGATGSPGSSPSASTGTGPGSSPSASTGTGPGASP

SEQ ID NO: 78 - protein, 144 aa, synthetic construct
  REGION 1..144: note = Description of Artificial Sequence: Synthetic polypeptide
PGSSPSASTGTGPGSSPSASTGTGPGTPGSGTASSSPGSSTPSGATGSPGSSPSASTGTGPGASPGTSSTGSPGTPGSGTASSSPGSSTPSGATGSPGTPGSGTASSSPGASPGTSSTGSPGASPGTSSTGSPGTPGSGTASSS

SEQ ID NO: 79 - protein, 144 aa, synthetic construct
  REGION 1..144: note = Description of Artificial Sequence: Synthetic polypeptide
GASPGTSSTGSPGSSPSASTGTGPGSSPSASTGTGPGTPGSGTASSSPGSSTPSGATGSPGSSPSASTGTGPGASPGTSSTGSPGTPGSGTASSSPGSSTPSGATGSPGTPGSGTASSSPGASPGTSSTGSPGASPGTSSTGSP

SEQ ID NO: 80 - protein, 144 aa, synthetic construct
  REGION 1..144: note = Description of Artificial Sequence: Synthetic polypeptide
GTPGSGTASSSPGSSTPSGATGSPGASPGTSSTGSPGTPGSGTASSSPGSSTPSGATGSPGSSPSASTGTGPGSSPSASTGTGPGSSTPSGATGSPGSSTPSGATGSPGASPGTSSTGSPGASPGTSSTGSPGASPGTSSTGSP

SEQ ID NO: 81 - protein, 144 aa, synthetic construct
  REGION 1..144: note = Description of Artificial Sequence: Synthetic polypeptide
GTPGSGTASSSPGASPGTSSTGSPGASPGTSSTGSPGASPGTSSTGSPGSSPSASTGTGPGTPGSGTASSSPGASPGTSSTGSPGASPGTSSTGSPGASPGTSSTGSPGSSTPSGATGSPGSSTPSGATGSPGASPGTSSTGSP

SEQ ID NO: 82 - protein, 144 aa, synthetic construct
  REGION 1..144: note = Description of Artificial Sequence: Synthetic polypeptide
GSSPSASTGTGPGSSPSASTGTGPGASPGTSSTGSPGASPGTSSTGSPGSSTPSGATGSPGSSPSASTGTGPGASPGTSSTGSPGSSPSASTGTGPGTPGSGTASSSPGSSTPSGATGSPGSSTPSGATGSPGASPGTSSTGSP

SEQ ID NO: 83 - protein, 144 aa, synthetic construct
  REGION 1..144: note = Description of Artificial Sequence: Synthetic polypeptide
GTPGSGTASSSPGSSTPSGATGSPGSSTPSGATGSPGSSPSASTGTGPGSSPSASTGTGPGASPGTSSTGSPGTPGSGTASSSPGSSTPSGATGSPGSSPSASTGTGPGSSPSASTGTGPGASPGTSSTGSPGASPGTSSTGSP

SEQ ID NO: 84 - protein, 144 aa, synthetic construct
  REGION 1..144: note = Description of Artificial Sequence: Synthetic polypeptide
GTPGSGTASSSPGSSTPSGATGSPGSSPSASTGTGPGSSPSASTGTGPGASPGTSSTGSPGASPGTSSTGSPGSSTPSGATGSPGSSPSASTGTGPGASPGTSSTGSPGSSPSASTGTGPGTPGSGTASSSPGSSTPSGATGSP

SEQ ID NO: 85 - protein, 288 aa, synthetic construct
  REGION 1..288: note = Description of Artificial Sequence: Synthetic polypeptide
GTSESATPESGPGSEPATSGSETPGTSESATPESGPGSEPATSGSETPGTSESATPESGPGTSTEPSEGSAPGSPAGSPTSTEEGTSESATPESGPGSEPATSGSETPGTSESATPESGPGSPAGSPTSTEEGSPAGSPTSTEEGTSTEPSEGSAPGTSESATPESGPGTSESATPESGPGTSESATPESGPGSEPATSGSETPGSEPATSGSETPGSPAGSPTSTEEGTSTEPSEGSAPGTSTEPSEGSAPGSEPATSGSETPGTSESATPESGPGTSTEPSEGSAP

SEQ ID NO: 86 - protein, 288 aa, synthetic construct
  REGION 1..288: note = Description of Artificial Sequence: Synthetic polypeptide
GSPAGSPTSTEEGTSESATPESGPGSEPATSGSETPGTSESATPESGPGTSTEPSEGSAPGTSTEPSEGSAPGTSTEPSEGSAPGTSTEPSEGSAPGTSTEPSEGSAPGTSTEPSEGSAPGSPAGSPTSTEEGTSTEPSEGSAPGTSESATPESGPGSEPATSGSETPGTSESATPESGPGSEPATSGSETPGTSESATPESGPGTSTEPSEGSAPGTSESATPESGPGSPAGSPTSTEEGSPAGSPTSTEEGSPAGSPTSTEEGTSESATPESGPGTSTEPSEGSAP

SEQ ID NO: 87 - protein, 288 aa, synthetic construct
  REGION 1..288: note = Description of Artificial Sequence: Synthetic polypeptide
PGASPGTSSTGSPGASPGTSSTGSPGTPGSGTASSSPGSSTPSGATGSPGTPGSGTASSSPGSSTPSGATGSPGTPGSGTASSSPGSSTPSGATGSPGSSTPSGATGSPGSSPSASTGTGPGSSPSASTGTGPGASPGTSSTGSPGTPGSGTASSSPGSSTPSGATGSPGSSPSASTGTGPGSSPSASTGTGPGASPGTSSTGSPGASPGTSSTGSPGSSTPSGATGSPGSSPSASTGTGPGASPGTSSTGSPGSSPSASTGTGPGTPGSGTASSSPGSSTPSGATGS

SEQ ID NO: 88 - protein, 288 aa, synthetic construct
  REGION 1..288: note = Description of Artificial Sequence: Synthetic polypeptide
GSSPSASTGTGPGSSPSASTGTGPGTPGSGTASSSPGSSTPSGATGSPGSSPSASTGTGPGASPGTSSTGSPGTPGSGTASSSPGSSTPSGATGSPGTPGSGTASSSPGASPGTSSTGSPGASPGTSSTGSPGTPGSGTASSSPGSSTPSGATGSPGASPGTSSTGSPGTPGSGTASSSPGSSTPSGATGSPGSSPSASTGTGPGSSPSASTGTGPGSSTPSGATGSPGSSTPSGATGSPGASPGTSSTGSPGASPGTSSTGSPGASPGTSSTGSPGTPGSGTASSSP

SEQ ID NO: 89 - protein, 504 aa, synthetic construct
  REGION 1..504: note = Description of Artificial Sequence: Synthetic polypeptide
  MOD_RES 63: note = Any amino acid
  MOD_RES 207: note = Any amino acid
GASPGTSSTGSPGSSPSASTGTGPGSSPSASTGTGPGTPGSGTASSSPGSSTPSGATGSPGSXPSASTGTGPGASPGTSSTGSPGTPGSGTASSSPGSSTPSGATGSPGTPGSGTASSSPGASPGTSSTGSPGASPGTSSTGSPGTPGSGTASSSPGSSTPSGATGSPGASPGTSSTGSPGTPGSGTASSSPGSSTPSGATGSPGSXPSASTGTGPGSSPSASTGTGPGSSTPSGATGSPGSSTPSGATGSPGASPGTSSTGSPGASPGTSSTGSPGASPGTSSTGSPGTPGSGTASSSPGASPGTSSTGSPGASPGTSSTGSPGASPGTSSTGSPGSSPSASTGTGPGTPGSGTASSSPGASPGTSSTGSPGASPGTSSTGSPGASPGTSSTGSPGSSTPSGATGSPGSSTPSGATGSPGASPGTSSTGSPGTPGSGTASSSPGSSTPSGATGSPGSSTPSGATGSPGSSTPSGATGSPGSSPSASTGTGPGASPGTSSTGSP

SEQ ID NO: 90 - protein, 540 aa, synthetic construct
  REGION 1..540: note = Description of Artificial Sequence: Synthetic polypeptide
GSTSSTAESPGPGSTSSTAESPGPGSTSESPSGTAPGSTSSTAESPGPGSTSSTAESPGPGTSTPESGSASPGSTSESPSGTAPGTSPSGESSTAPGSTSESPSGTAPGSTSESPSGTAPGTSPSGESSTAPGSTSESPSGTAPGSTSESPSGTAPGTSPSGESSTAPGSTSESPSGTAPGSTSESPSGTAPGSTSESPSGTAPGTSTPESGSASPGSTSESPSGTAPGTSTPESGSASPGSTSSTAESPGPGSTSSTAESPGPGTSTPESGSASPGTSTPESGSASPGSTSESPSGTAPGTSTPESGSASPGTSTPESGSASPGSTSESPSGTAPGSTSESPSGTAPGSTSESPSGTAPGSTSSTAESPGPGTSTPESGSASPGTSTPESGSASPGSTSESPSGTAPGSTSESPSGTAPGTSTPESGSASPGSTSESPSGTAPGSTSESPSGTAPGTSTPESGSASPGTSPSGESSTAPGSTSSTAESPGPGTSPSGESSTAPGSTSSTAESPGPGTSTPESGSASPGSTSESPSGTAP

SEQ ID NO: 91 - protein, 576 aa, synthetic construct
  REGION 1..576: note = Description of Artificial Sequence: Synthetic polypeptide
GSSESGSSEGGPGSGGEPSESGSSGSSESGSSEGGPGSSESGSSEGGPGSSESGSSEGGPGSSESGSSEGGPGSSESGSSEGGPGESPGGSSGSESGSEGSSGPGESSGSSESGSSEGGPGSSESGSSEGGPGSSESGSSEGGPGSGGEPSESGSSGESPGGSSGSESGESPGGSSGSESGSGGEPSESGSSGSSESGSSEGGPGSGGEPSESGSSGSGGEPSESGSSGSEGSSGPGESSGESPGGSSGSESGSGGEPSESGSSGSGGEPSESGSSGSGGEPSESGSSGSSESGSSEGGPGESPGGSSGSESGESPGGSSGSESGESPGGSSGSESGESPGGSSGSESGESPGGSSGSESGSSESGSSEGGPGSGGEPSESGSSGSEGSSGPGESSGSSESGSSEGGPGSGGEPSESGSSGSSESGSSEGGPGSGGEPSESGSSGESPGGSSGSESGESPGGSSGSESGSSESGSSEGGPGSGGEPSESGSSGSSESGSSEGGPGSGGEPSESGSSGSGGEPSESGSSGESPGGSSGSESGSEGSSGPGESSGSSESGSSEGGPGSEGSSGPGESS

SEQ ID NO: 92 - protein, 576 aa, synthetic construct
  REGION 1..576: note = Description of Artificial Sequence: Synthetic polypeptide
GSPAGSPTSTEEGTSESATPESGPGTSTEPSEGSAPGSPAGSPTSTEEGTSTEPSEGSAPGTSTEPSEGSAPGTSESATPESGPGSEPATSGSETPGSEPATSGSETPGSPAGSPTSTEEGTSESATPESGPGTSTEPSEGSAPGTSTEPSEGSAPGSPAGSPTSTEEGTSTEPSEGSAPGTSTEPSEGSAPGTSESATPESGPGTSTEPSEGSAPGTSESATPESGPGSEPATSGSETPGTSTEPSEGSAPGTSTEPSEGSAPGTSESATPESGPGTSESATPESGPGSPAGSPTSTEEGTSESATPESGPGSEPATSGSETPGTSESATPESGPGTSTEPSEGSAPGTSTEPSEGSAPGTSTEPSEGSAPGTSTEPSEGSAPGTSTEPSEGSAPGTSTEPSEGSAPGSPAGSPTSTEEGTSTEPSEGSAPGTSESATPESGPGSEPATSGSETPGTSESATPESGPGSEPATSGSETPGTSESATPESGPGTSTEPSEGSAPGTSESATPESGPGSPAGSPTSTEEGSPAGSPTSTEEGSPAGSPTSTEEGTSESATPESGPGTSTEPSEGSAP

SEQ ID NO: 93 - protein, 576 aa, synthetic construct
  REGION 1..576: note = Description of Artificial Sequence: Synthetic polypeptide
GSTSSTAESPGPGSTSSTAESPGPGSTSESPSGTAPGSTSSTAESPGPGSTSSTAESPGPGTSTPESGSASPGSTSESPSGTAPGTSPSGESSTAPGSTSESPSGTAPGSTSESPSGTAPGTSPSGESSTAPGSTSESPSGTAPGSTSESPSGTAPGTSPSGESSTAPGSTSESPSGTAPGSTSESPSGTAPGSTSESPSGTAPGTSTPESGSASPGSTSESPSGTAPGTSTPESGSASPGSTSSTAESPGPGSTSSTAESPGPGTSTPESGSASPGTSTPESGSASPGSTSESPSGTAPGTSTPESGSASPGTSTPESGSASPGSTSESPSGTAPGSTSESPSGTAPGSTSESPSGTAPGSTSSTAESPGPGTSTPESGSASPGTSTPESGSASPGSTSESPSGTAPGSTSESPSGTAPGTSTPESGSASPGSTSESPSGTAPGSTSESPSGTAPGTSTPESGSASPGTSPSGESSTAPGSTSSTAESPGPGTSPSGESSTAPGSTSSTAESPGPGTSTPESGSASPGSTSESPSGTAPGSTSSTAESPGPGTSTPESGSASPGTSTPESGSASP

SEQ ID NO: 94 - protein, 576 aa, synthetic construct
  REGION 1..576: note = Description of Artificial Sequence: Synthetic polypeptide
PGTPGSGTASSSPGSSTPSGATGSPGSSPSASTGTGPGSSPSASTGTGPGSSTPSGATGSPGSSTPSGATGSPGASPGTSSTGSPGASPGTSSTGSPGASPGTSSTGSPGTPGSGTASSSPGASPGTSSTGSPGASPGTSSTGSPGASPGTSSTGSPGSSPSASTGTGPGTPGSGTASSSPGASPGTSSTGSPGASPGTSSTGSPGASPGTSSTGSPGSSTPSGATGSPGSSTPSGATGSPGASPGTSSTGSPGTPGSGTASSSPGSSTPSGATGSPGSSTPSGATGSPGSSTPSGATGSPGSSPSASTGTGPGASPGTSSTGSPGASPGTSSTGSPGTPGSGTASSSPGASPGTSSTGSPGASPGTSSTGSPGASPGTSSTGSPGASPGTSSTGSPGTPGSGTASSSPGSSTPSGATGSPGTPGSGTASSSPGSSTPSGATGSPGTPGSGTASSSPGSSTPSGATGSPGSSTPSGATGSPGSSPSASTGTGPGSSPSASTGTGPGASPGTSSTGSPGTPGSGTASSSPGSSTPSGATGSPGSSPSASTGTGPGSSPSASTGTGPGASPGTSSTGS

SEQ ID NO: 95 - protein, 625 aa, synthetic construct
  REGION 1..625: note = Description of Artificial Sequence: Synthetic polypeptide
MAEPAGSPTSTEEGTPGSGTASSSPGSSTPSGATGSPGASPGTSSTGSPGSPAGSPTSTEEGTSESATPESGPGTSTEPSEGSAPGSPAGSPTSTEEGTSTEPSEGSAPGTSTEPSEGSAPGTSESATPESGPGSEPATSGSETPGSEPATSGSETPGSPAGSPTSTEEGTSESATPESGPGTSTEPSEGSAPGTSTEPSEGSAPGSPAGSPTSTEEGTSTEPSEGSAPGTSTEPSEGSAPGTSESATPESGPGTSTEPSEGSAPGTSESATPESGPGSEPATSGSETPGTSTEPSEGSAPGTSTEPSEGSAPGTSESATPESGPGTSESATPESGPGSPAGSPTSTEEGTSESATPESGPGSEPATSGSETPGTSESATPESGPGTSTEPSEGSAPGTSTEPSEGSAPGTSTEPSEGSAPGTSTEPSEGSAPGTSTEPSEGSAPGTSTEPSEGSAPGSPAGSPTSTEEGTSTEPSEGSAPGTSESATPESGPGSEPATSGSETPGTSESATPESGPGSEPATSGSETPGTSESATPESGPGTSTEPSEGSAPGTSESATPESGPGSPAGSPTSTEEGSPAGSPTSTEEGSPAGSPTSTEEGTSESATPESGPGTSTEPSEGSAP

SEQ ID NO: 96 - protein, 836 aa, synthetic construct
  REGION 1..836: note = Description of Artificial Sequence: Synthetic polypeptide
GSSESGSSEGGPGSSESGSSEGGPGESPGGSSGSESGSGGEPSESGSSGESPGGSSGSESGESPGGSSGSESGSSESGSSEGGPGSSESGSSEGGPGSSESGSSEGGPGESPGGSSGSESGESPGGSSGSESGESPGGSSGSESGSSESGSSEGGPGSSESGSSEGGPGSSESGSSEGGPGSSESGSSEGGPGSSESGSSEGGPGSSESGSSEGGPGSGGEPSESGSSGESPGGSSGSESGESPGGSSGSESGSGGEPSESGSSGSEGSSGPGESSGSSESGSSEGGPGSGGEPSESGSSGSEGSSGPGESSGSSESGSSEGGPGSGGEPSESGSSGESPGGSSGSESGSGGEPSESGSSGSGGEPSESGSSGSSESGSSEGGPGSGGEPSESGSSGSGGEPSESGSSGSEGSSGPGESSGESPGGSSGSESGSEGSSGPGESSGSEGSSGPGESSGSGGEPSESGSSGSSESGSSEGGPGSSESGSSEGGPGESPGGSSGSESGSGGEPSESGSSGSEGSSGPGESSGESPGGSSGSESGSEGSSGPGSSESGSSEGGPGSGGEPSESGSSGSEGSSGPGESSGSEGSSGPGESSGSEGSSGPGESSGSGGEPSESGSSGSGGEPSESGSSGESPGGSSGSESGESPGGSSGSESGSGGEPSESGSSGSEGSSGPGESSGESPGGSSGSESGSSESGSSEGGPGSSESGSSEGGPGSSESGSSEGGPGSGGEPSESGSSGSSESGSSEGGPGESPGGSSGSESGSGGEPSESGSSGSSESGSSEGGPGESPGGSSGSESGSGGEPSESGSSGESPGGSSGSESGSGGEPSESGSS

SEQ ID NO: 97 - protein, 864 aa, synthetic construct
  REGION 1..864: note = Description of Artificial Sequence: Synthetic polypeptide
GSPAGSPTSTEEGTSESATPESGPGTSTEPSEGSAPGSPAGSPTSTEEGTSTEPSEGSAPGTSTEPSEGSAPGTSESATPESGPGSEPATSGSETPGSEPATSGSETPGSPAGSPTSTEEGTSESATPESGPGTSTEPSEGSAPGTSTEPSEGSAPGSPAGSPTSTEEGTSTEPSEGSAPGTSTEPSEGSAPGTSESATPESGPGTSTEPSEGSAPGTSESATPESGPGSEPATSGSETPGTSTEPSEGSAPGTSTEPSEGSAPGTSESATPESGPGTSESATPESGPGSPAGSPTSTEEGTSESATPESGPGSEPATSGSETPGTSESATPESGPGTSTEPSEGSAPGTSTEPSEGSAPGTSTEPSEGSAPGTSTEPSEGSAPGTSTEPSEGSAPGTSTEPSEGSAPGSPAGSPTSTEEGTSTEPSEGSAPGTSESATPESGPGSEPATSGSETPGTSESATPESGPGSEPATSGSETPGTSESATPESGPGTSTEPSEGSAPGTSESATPESGPGSPAGSPTSTEEGSPAGSPTSTEEGSPAGSPTSTEEGTSESATPESGPGTSTEPSEGSAPGTSESATPESGPGSEPATSGSETPGTSESATPESGPGSEPATSGSETPGTSESATPESGPGTSTEPSEGSAPGSPAGSPTSTEEGTSESATPESGPGSEPATSGSETPGTSESATPESGPGSPAGSPTSTEEGSPAGSPTSTEEGTSTEPSEGSAPGTSESATPESGPGTSESATPESGPGTSESATPESGPGSEPATSGSETPGSEPATSGSETPGSPAGSPTSTEEGTSTEPSEGSAPGTSTEPSEGSAPGSEPATSGSETPGTSESATPESGPGTSTEPSEGSAP

SEQ ID NO: 98 - protein, 875 aa, synthetic construct
  REGION 1..875: note = Description of Artificial Sequence: Synthetic polypeptide
  MOD_RES 430..432: note = Any amino acid
  MOD_RES 443..446: note = Any amino acid
GSTSESPSGTAPGTSPSGESSTAPGSTSESPSGTAPGSTSESPSGTAPGTSTPESGSASPGTSTPESGSASPGSTSESPSGTAPGSTSESPSGTAPGTSPSGESSTAPGSTSESPSGTAPGTSPSGESSTAPGTSPSGESSTAPGSTSSTAESPGPGTSPSGESSTAPGTSPSGESSTAPGSTSSTAESPGPGTSTPESGSASPGTSTPESGSASPGSTSESPSGTAPGSTSESPSGTAPGTSTPESGSASPGSTSSTAESPGPGTSTPESGSASPGSTSESPSGTAPGTSPSGESSTAPGSTSSTAESPGPGTSPSGESSTAPGTSTPESGSASPGSTSSTAESPGPGSTSSTAESPGPGSTSSTAESPGPGSTSSTAESPGPGTSPSGESSTAPGSTSESPSGTAPGSTSESPSGTAPGTSTPESGPXXXGASASGAPSTXXXXSESPSGTAPGSTSESPSGTAPGSTSESPSGTAPGSTSESPSGTAPGSTSESPSGTAPGSTSESPSGTAPGTSTPESGSASPGTSPSGESSTAPGTSPSGESSTAPGSTSSTAESPGPGTSPSGESSTAPGTSTPESGSASPGSTSESPSGTAPGSTSESPSGTAPGTSPSGESSTAPGSTSESPSGTAPGTSTPESGSASPGTSTPESGSASPGSTSESPSGTAPGTSTPESGSASPGSTSSTAESPGPGSTSESPSGTAPGSTSESPSGTAPGTSPSGESSTAPGSTSSTAESPGPGTSPSGESSTAPGTSTPESGSASPGTSPSGESSTAPGTSPSGESSTAPGTSPSGESSTAPGSTSSTAESPGPGSTSSTAESPGPGTSPSGESSTAPGSSPSASTGTGPGSSTPSGATGSPGSSTPSGATGSP

SEQ ID NO: 99 - protein, 864 aa, synthetic construct
  REGION 1..864: note = Description of Artificial Sequence: Synthetic polypeptide
GASPGTSSTGSPGSSPSASTGTGPGSSPSASTGTGPGTPGSGTASSSPGSSTPSGATGSPGSSPSASTGTGPGASPGTSSTGSPGTPGSGTASSSPGSSTPSGATGSPGTPGSGTASSSPGASPGTSSTGSPGASPGTSSTGSPGTPGSGTASSSPGSSTPSGATGSPGASPGTSSTGSPGTPGSGTASSSPGSSTPSGATGSPGSSPSASTGTGPGSSPSASTGTGPGSSTPSGATGSPGSSTPSGATGSPGASPGTSSTGSPGASPGTSSTGSPGASPGTSSTGSPGTPGSGTASSSPGASPGTSSTGSPGASPGTSSTGSPGASPGTSSTGSPGSSPSASTGTGPGTPGSGTASSSPGASPGTSSTGSPGASPGTSSTGSPGASPGTSSTGSPGSSTPSGATGSPGSSTPSGATGSPGASPGTSSTGSPGTPGSGTASSSPGSSTPSGATGSPGSSTPSGATGSPGSSTPSGATGSPGSSPSASTGTGPGASPGTSSTGSPGASPGTSSTGSPGTPGSGTASSSPGASPGTSSTGSPGASPGTSSTGSPGASPGTSSTGSPGASPGTSSTGSPGTPGSGTASSSPGSSTPSGATGSPGTPGSGTASSSPGSSTPSGATGSPGTPGSGTASSSPGSSTPSGATGSPGSSTPSGATGSPGSSPSASTGTGPGSSPSASTGTGPGASPGTSSTGSPGTPGSGTASSSPGSSTPSGATGSPGSSPSASTGTGPGSSPSASTGTGPGASPGTSSTGSPGASPGTSSTGSPGSSTPSGATGSPGSSPSASTGTGPGASPGTSSTGSPGSSPSASTGTGPGTPGSGTASSSPGSSTPSGATGSPGSSTPSGATGSPGASPGTSSTGSP

SEQ ID NO: 100 - protein, 875 aa, synthetic construct
  REGION 1..875: note = Description of Artificial Sequence: Synthetic polypeptide
GTSTEPSEGSAPGSEPATSGSETPGSPAGSPTSTEEGSTSSTAESPGPGTSTPESGSASPGSTSESPSGTAPGSTSESPSGTAPGTSTPESGSASPGTSTPESGSASPGSEPATSGSETPGTSESATPESGPGSPAGSPTSTEEGTSTEPSEGSAPGTSESATPESGPGTSTEPSEGSAPGTSTEPSEGSAPGSPAGSPTSTEEGTSTEPSEGSAPGTSTEPSEGSAPGTSESATPESGPGTSESATPESGPGTSTEPSEGSAPGTSTEPSEGSAPGTSESATPESGPGTSTEPSEGSAPGSEPATSGSETPGSPAGSPTSTEEGSSTPSGATGSPGTPGSGTASSSPGSSTPSGATGSPGTSTEPSEGSAPGTSTEPSEGSAPGSEPATSGSETPGSPAGSPTSTEEGSPAGSPTSTEEGTSTEPSEGSAPGASASGAPSTGGTSESATPESGPGSPAGSPTSTEEGSPAGSPTSTEEGSTSSTAESPGPGSTSESPSGTAPGTSPSGESSTAPGTPGSGTASSSPGSSTPSGATGSPGSSPSASTGTGPGSEPATSGSETPGTSESATPESGPGSEPATSGSETPGSTSSTAESPGPGSTSSTAESPGPGTSPSGESSTAPGSEPATSGSETPGSEPATSGSETPGTSTEPSEGSAPGSTSSTAESPGPGTSTPESGSASPGSTSESPSGTAPGTSTEPSEGSAPGTSTEPSEGSAPGTSTEPSEGSAPGSSTPSGATGSPGSSPSASTGTGPGASPGTSSTGSPGSEPATSGSETPGTSESATPESGPGSPAGSPTSTEEGSSTPSGATGSPGSSPSASTGTGPGASPGTSSTGSPGTSESATPESGPGTSTEPSEGSAPGTSTEPSEGSAP

SEQ ID NO: 101 - protein, 1318 aa, synthetic construct
  REGION 1..1318: note = Description of Artificial Sequence: Synthetic polypeptide
GTSTEPSEGSAPGSEPATSGSETPGSPAGSPTSTEEGSTSSTAESPGPGTSTPESGSASPGSTSESPSGTAPGSTSESPSGTAPGTSTPESGSASPGTSTPESGSASPGSEPATSGSETPGTSESATPESGPGSPAGSPTSTEEGTSTEPSEGSAPGTSESATPESGPGTSTEPSEGSAPGTSTEPSEGSAPGSPAGSPTSTEEGTSTEPSEGSAPGTSTEPSEGSAPGTSESATPESGPGTSESATPESGPGTSTEPSEGSAPGTSTEPSEGSAPGTSESATPESGPGTSTEPSEGSAPGSEPATSGSETPGSPAGSPTSTEEGSSTPSGATGSPGTPGSGTASSSPGSSTPSGATGSPGTSTEPSEGSAPGTSTEPSEGSAPGSEPATSGSETPGSPAGSPTSTEEGSPAGSPTSTEEGTSTEPSEGSAPGPEPTGPAPSGGSEPATSGSETPGTSESATPESGPGSPAGSPTSTEEGTSESATPESGPGSPAGSPTSTEEGSPAGSPTSTEEGTSESATPESGPGSPAGSPTSTEEGSPAGSPTSTEEGSTSSTAESPGPGSTSESPSGTAPGTSPSGESSTAPGSTSESPSGTAPGSTSESPSGTAPGTSPSGESSTAPGTSTEPSEGSAPGTSESATPESGPGTSESATPESGPGSEPATSGSETPGTSESATPESGPGTSESATPESGPGTSTEPSEGSAPGTSESATPESGPGTSTEPSEGSAPGTSPSGESSTAPGTSPSGESSTAPGTSPSGESSTAPGTSTEPSEGSAPGSPAGSPTSTEEGTSTEPSEGSAPGSSPSASTGTGPGSSTPSGATGSPGSSTPSGATGSPGSSTPSGATGSPGSSTPSGATGSPGASPGTSSTGSPGASASGAPSTGGTSPSGESSTAPGSTSSTAESPGPGTSPSGESSTAPGTSESATPESGPGTSTEPSEGSAPGTSTEPSEGSAPGSSPSASTGTGPGSSTPSGATGSPGASPGTSSTGSPGTSTPESGSASPGTSPSGESSTAPGTSPSGESSTAPGTSESATPESGPGSEPATSGSETPGTSTEPSEGSAPGSTSESPSGTAPGSTSESPSGTAPGTSTPESGSASPGSPAGSPTSTEEGTSESATPESGPGTSTEPSEGSAPGSPAGSPTSTEEGTSESATPESGPGSEPATSGSETPGSSTPSGATGSPGASPGTSSTGSPGSSTPSGATGSPGSTSESPSGTAPGTSPSGESSTAPGSTSSTAESPGPGSSTPSGATGSPGASPGTSSTGSPGTPGSGTASSSPGSPAGSPTSTEEGSPAGSPTSTEEGTSTEPSEGSAP

SEQ ID NO: 102 - protein, 864 aa, synthetic construct
  REGION 1..864: note = Description of Artificial Sequence: Synthetic polypeptide
GTSTEPSEPGSAGTSTEPSEPGSAGSEPATSGTEPSGSGASEPTSTEPGSEPATSGTEPSGSEPATSGTEPSGSEPATSGTEPSGSGASEPTSTEPGTSTEPSEPGSAGSEPATSGTEPSGTSTEPSEPGSAGSEPATSGTEPSGSEPATSGTEPSGTSTEPSEPGSAGTSTEPSEPGSAGSEPATSGTEPSGSEPATSGTEPSGTSEPSTSEPGAGSGASEPTSTEPGTSEPSTSEPGAGSEPATSGTEPSGSEPATSGTEPSGTSTEPSEPGSAGTSTEPSEPGSAGSGASEPTSTEPGSEPATSGTEPSGSEPATSGTEPSGSEPATSGTEPSGSEPATSGTEPSGTSTEPSEPGSAGSEPATSGTEPSGSGASEPTSTEPGTSTEPSEPGSAGSEPATSGTEPSGSGASEPTSTEPGTSTEPSEPGSAGSGASEPTSTEPGSEPATSGTEPSGSGASEPTSTEPGSEPATSGTEPSGSGASEPTSTEPGTSTEPSEPGSAGSEPATSGTEPSGSGASEPTSTEPGTSTEPSEPGSAGSEPATSGTEPSGTSTEPSEPGSAGSEPATSGTEPSGTSTEPSEPGSAGTSTEPSEPGSAGTSTEPSEPGSAGTSTEPSEPGSAGTSTEPSEPGSAGTSTEPSEPGSAGTSEPSTSEPGAGSGASEPTSTEPGTSTEPSEPGSAGTSTEPSEPGSAGTSTEPSEPGSAGSEPATSGTEPSGSGASEPTSTEPGSEPATSGTEPSGSEPATSGTEPSGSEPATSGTEPSGSEPATSGTEPSGTSEPSTSEPGAGSEPATSGTEPSGSGASEPTSTEPGTSTEPSEPGSAGSEPATSGTEPSGSGASEPTSTEPGTSTEPSEPGSA

SEQ ID NO: 103 - protein, 864 aa, synthetic construct
  REGION 1..864: note = Description of Artificial Sequence: Synthetic polypeptide
GSETATSGSETAGTSESATSESGAGSTAGSETSTEAGTSESATSESGAGSETATSGSETAGSETATSGSETAGTSTEASEGSASGTSTEASEGSASGTSESATSESGAGSETATSGSETAGTSTEASEGSASGSTAGSETSTEAGTSESATSESGAGTSESATSESGAGSETATSGSETAGTSESATSESGAGTSTEASEGSASGSETATSGSETAGSETATSGSETAGTSTEASEGSASGSTAGSETSTEAGTSESATSESGAGTSTEASEGSASGSETATSGSETAGSTAGSETSTEAGSTAGSETSTEAGSETATSGSETAGTSESATSESGAGTSESATSESGAGSETATSGSETAGTSESATSESGAGTSESATSESGAGSETATSGSETAGSETATSGSETAGTSTEASEGSASGSTAGSETSTEAGSETATSGSETAGTSESATSESGAGSTAGSETSTEAGSTAGSETSTEAGSTAGSETSTEAGTSTEASEGSASGSTAGSETSTEAGSTAGSETSTEAGTSTEASEGSASGSTAGSETSTEAGSETATSGSETAGTSTEASEGSASGTSESATSESGAGSETATSGSETAGTSESATSESGAGTSESATSESGAGSETATSGSETAGTSESATSESGAGSETATSGSETAGTSTEASEGSASGTSTEASEGSASGSTAGSETSTEAGSTAGSETSTEAGSETATSGSETAGTSESATSESGAGTSESATSESGAGSETATSGSETAGSETATSGSETAGSETATSGSETAGTSTEASEGSASGTSESATSESGAGSETATSGSETAGSETATSGSETAGTSESATSESGAGTSESATSESGAGSETATSGSETA

SEQ ID NO: 104 - protein, 948 aa, synthetic construct
  REGION 1..948: note = Description of Artificial Sequence: Synthetic polypeptide
GTSTEPSEGSAPGTSESATPESGPGSEPATSGSETPGTSESATPESGPGTSTEPSEGSAPGSPAGSPTSTEEGTSTEPSEGSAPGSEPATSGSETPGTSESATPESGPGTSESATPESGPGSEPATSGSETPGTSTEPSEGSAPGTSESATPESGPGTSTEPSEGSAPGTSTEPSEGSAPGSEPATSGSETPGTSTEPSEGSAPGSEPATSGSETPGSEPATSGSETPGTSTEPSEGSAPGSEPATSGSETPGSEPATSGSETPGTSTEPSEGSAPGSEPATSGSETPGSPAGSPTSTEEGTSESATPESGPGTSTEPSEGSAPGSEPATSGSETPGTSESATPESGPGSEPATSGSETPGSEPATSGSETPGTSESATPESGPGSPAGSPTSTEEGTSESATPESGPGSPAGSPTSTEEGTSTEPSEGSAPGTSESATPESGPGTSTEPSEGSAPGTSTEPSEGSAPGSPAGSPTSTEEGTSTEPSEGSAPGTSESATPESGPGSPAGSPTSTEEGSPAGSPTSTEEGTSESATPESGPGTSESATPESGPGTSTEPSEGSAPGSPAGSPTSTEEGTSESATPESGPGTSTEPSEGSAPGSEPATSGSETPGSPAGSPTSTEEGTSESATPESGPGTSTEPSEGSAPGSEPATSGSETPGSEPATSGSETPGSEPATSGSETPGSPAGSPTSTEEGTSESATPESGPGSEPATSGSETPGSEPATSGSETPGSPAGSPTSTEEGSPAGSPTSTEEGSPAGSPTSTEEGTSESATPESGPGSEPATSGSETPGTSTEPSEGSAPGTSTEPSEGSAPGSPAGSPTSTEEGSPAGSPTSTEEGSPAGSPTSTEEGTSTEPSEGSAPGTSESATPESGPGTSESATPESGPGTSTEPSEGSAPGTSTEPSEGSAPGTSTEPSEGSAPGTSESATPESGPGTSESATPESGP

SEQ ID NO: 105 - protein, 1024 aa, synthetic construct
  REGION 1..1024: note = Description of Artificial Sequence: Synthetic polypeptide
GSEPATSGSETPGSEPATSGSETPGTSTEPSEGSAPGTSESATPESGPGSPAGSPTSTEEGTSTEPSEGSAPGTSESATPESGPGTSESATPESGPGSEPATSGSETPGSEPATSGSETPGTSESATPESGPGTSESATPESGPGSPAGSPTSTEEGTSTEPSEGSAPGSEPATSGSETPGTSTEPSEGSAPGSPAGSPTSTEEGSPAGSPTSTEEGSPAGSPTSTEEGTSTEPSEGSAPGTSESATPESGPGSEPATSGSETPGTSESATPESGPGTSESATPESGPGSPAGSPTSTEEGTSTEPSEGSAPGSEPATSGSETPGTSTEPSEGSAPGTSESATPESGPGSPAGSPTSTEEGTSTEPSEGSAPGTSTEPSEGSAPGSPAGSPTSTEEGTSTEPSEGSAPGTSESATPESGPGSPAGSPTSTEEGTSESATPESGPGSEPATSGSETPGTSTEPSEGSAPGSEPATSGSETPGTSESATPESGPGTSTEPSEGSAPGTSESATPESGPGTSTEPSEGSAPGTSTEPSEGSAPGSEPATSGSETPGSPAGSPTSTEEGTSESATPESGPGTSTEPSEGSAPGSPAGSPTSTEEGTSTEPSEGSAPGTSESATPESGPGTSTEPSEGSAPGSEPATSGSETPGSEPATSGSETPGTSESATPESGPGTSESATPESGPGTSESATPESGPGTSTEPSEGSAPGTSTEPSEGSAPGSPAGSPTSTEEGSPAGSPTSTEEGTSESATPESGPGSPAGSPTSTEEGSPAGSPTSTEEGTSESATPESGPGSEPATSGSETPGTSTEPSEGSAPGSEPATSGSETPGSPAGSPTSTEEGTSESATPESGPGTSESATPESGPGSEPATSGSETPGTSTEPSEGSAPGTSTEPSEGSAPGSPAGSPTSTEEGTSTEPSEGSAPGTSTEPSEGSAPGSEPATSGSETPGSPAGSPTSTEEGTSESATPESGPGTSTEPSEGSAPGSPAGSPTSTEEGTSESATPESGPGTSESATPESGPGTST

SEQ ID NO: 106 - protein, 1024 aa, synthetic construct
  REGION 1..1024: note = Description of Artificial Sequence: Synthetic polypeptide
GSEPATSGSETPGSEPATSGSETPGTSTEPSEGSAPGSEPATSGSETPGTSESATPESGPGSEPATSGSETPGSPAGSPTSTEEGTSESATPESGPGSEPATSGSETPGTSTEPSEGSAPGTSESATPESGPGTSESATPESGPGTSTEPSEGSAPGTSTEPSEGSAPGSEPATSGSETPGSPAGSPTSTEEGTSTEPSEGSAPGSEPATSGSETPGSPAGSPTSTEEGTSTEPSEGSAPGTSESATPESGPGSPAGSPTSTEEGTSTEPSEGSAPGTSESATPESGPGSEPATSGSETPGTSESATPESGPGSEPATSGSETPGTSTEPSEGSAPGTSTEPSEGSAPGTSTEPSEGSAPGSPAGSPTSTEEGSPAGSPTSTEEGTSESATPESGPGTSTEPSEGSAPGTSTEPSEGSAPGSPAGSPTSTEEGSPAGSPTSTEEGSPAGSPTSTEEGTSESATPESGPGSEPATSGSETPGTSESATPESGPGSPAGSPTSTEEGTSTEPSEGSAPGTSESATPESGPGSEPATSGSETPGSPAGSPTSTEEGTSTEPSEGSAPGTSESATPESGPGTSESATPESGPGSPAGSPTSTEEGTSTEPSEGSAPGSPAGSPTSTEEGSPAGSPTSTEEGTSESATPESGPGSEPATSGSETPGTSTEPSEGSAPGSEPATSGSETPGTSESATPESGPGTSTEPSEGSAPGTSESATPESGPGTSESATPESGPGTSTEPSEGSAPGTSTEPSEGSAPGSEPATSGSETPGTSESATPESGPGTSTEPSEGSAPGSEPATSGSETPGSPAGSPTSTEEGTSESATPESGPGSPAGSPTSTEEGTSTEPSEGSAPGSEPATSGSETPGSEPATSGSETPGSEPATSGSETPGTSESATPESGPGTSESATPESGPGTSTEPSEGSAPGTSTEPSEGSAPGSEPATSGSETPGTSTEPSEGSAPGTSESATPESGPGSPAGSPTSTEEGSPAGSPTSTEEGTSTEPSEGSAPGSPAGSPTSTEEGSPA

SEQ ID NO: 107 - protein, 1024 aa, synthetic construct
  REGION 1..1024: note = Description of Artificial Sequence: Synthetic polypeptide
GSPAGSPTSTEEGTSTEPSEGSAPGSPAGSPTSTEEGTSESATPESGPGSEPATSGSETPGTSTEPSEGSAPGTSTEPSEGSAPGTSESATPESGPGTSTEPSEGSAPGTSTEPSEGSAPGSEPATSGSETPGSPAGSPTSTEEGTSESATPESGPGSPAGSPTSTEEGTSTEPSEGSAPGSPAGSPTSTEEGTSTEPSEGSAPGSPAGSPTSTEEGTSTEPSEGSAPGSPAGSPTSTEEGSPAGSPTSTEEGTSTEPSEGSAPGSEPATSGSETPGSPAGSPTSTEEGTSESATPESGPGSEPATSGSETPGSEPATSGSETPGTSESATPESGPGSPAGSPTSTEEGTSESATPESGPGSEPATSGSETPGSEPATSGSETPGTSESATPESGPGTSESATPESGPGTSTEPSEGSAPGTSTEPSEGSAPGTSESATPESGPGSPAGSPTSTEEGTSTEPSEGSAPGSEPATSGSETPGSPAGSPTSTEEGTSTEPSEGSAPGTSTEPSEGSAPGSPAGSPTSTEEGSPAGSPTSTEEGSPAGSPTSTEEGTSESATPESGPGSEPATSGSETPGTSESATPESGPGTSESATPESGPGTSTEPSEGSAPGTSESATPESGPGSPAGSPTSTEEGTSESATPESGPGTSESATPESGPGTSTEPSEGSAPGSEPATSGSETPGTSTEPSEGSAPGSPAGSPTSTEEGTSESATPESGPGTSTEPSEGSAPGTSTEPSEGSAPGSEPATSGSETPGSEPATSGSETPGTSESATPESGPGSEPATSGSETPGSPAGSPTSTEEGTSESATPESGPGSEPATSGSETPGTSTEPSEGSAPGTSESATPESGPGTSESATPESGPGTSTEPSEGSAPGSEPATSGSETPGTSTEPSEGSAPGSPAGSPTSTEEGSPAGSPTSTEEGTSESATPESGPGSEPATSGSETPGSPAGSPTSTEEGSPAGSPTSTEEGTSESATPESGPGSEPATSGSETPGTSTEPSEGSAPGTSTEPSEGSAPGSEP

SEQ ID NO: 108 - protein, 1024 aa, synthetic construct
  REGION 1..1024: note = Description of Artificial Sequence: Synthetic polypeptide
GSPAGSPTSTEEGTSTEPSEGSAPGTSESATPESGPGTSESATPESGPGSEPATSGSETPGTSTEPSEGSAPGTSESATPESGPGSPAGSPTSTEEGTSTEPSEGSAPGTSESATPESGPGSPAGSPTSTEEGTSTEPSEGSAPGTSESATPESGPGTSTEPSEGSAPGSEPATSGSETPGSEPATSGSETPGSEPATSGSETPGTSESATPESGPGSPAGSPTSTEEGTSESATPESGPGSEPATSGSETPGTSESATPESGPGTSESATPESGPGSPAGSPTSTEEGTSTEPSEGSAPGTSESATPESGPGTSTEPSEGSAPGTSTEPSEGSAPGTSTEPSEGSAPGSEPATSGSETPGTSTEPSEGSAPGTSESATPESGPGTSESATPESGPGTSTEPSEGSAPGTSESATPESGPGTSESATPESGPGSEPATSGSETPGTSTEPSEGSAPGTSESATPESGPGSPAGSPTSTEEGSPAGSPTSTEEGTSTEPSEGSAPGSEPATSGSETPGSEPATSGSETPGTSTEPSEGSAPGSEPATSGSETPGSPAGSPTSTEEGTSESATPESGPGSEPATSGSETPGSEPATSGSETPGTSESATPESGPGTSESATPESGPGTSTEPSEGSAPGSPAGSPTSTEEGTSESATPESGPGTSTEPSEGSAPGSEPATSGSETPGSPAGSPTSTEEGTSTEPSEGSAPGTSTEPSEGSAPGSEPATSGSETPGTSESATPESGPGTSTEPSEGSAPGSPAGSPTSTEEGTSESATPESGPGTSESATPESGPGTSTEPSEGSAPGSEPATSGSETPGSEPATSGSETPGTSTEPSEGSAPGTSESATPESGPGSPAGSPTSTEEGTSTEPSEGSAPGTSTEPSEGSAPGSPAGSPTSTEEGSPAGSPTSTEEGTSTEPSEGSAPGSEPATSGSETPGSPAGSPTSTEEGTSESATPESGPGSEPATSGSETPGSEPATSGSETPGTSESATPESGPGTSESATPESGPGTSTEPSEGSAPGTST

SEQ ID NO: 109 - protein, 1024 aa, synthetic construct
  REGION 1..1024: note = Description of Artificial Sequence: Synthetic polypeptide
GSEPATSGSETPGSPAGSPTSTEEGTSTEPSEGSAPGSEPATSGSETPGTSESATPESGPGTSTEPSEGSAPGTSESATPESGPGSPAGSPTSTEEGTSTEPSEGSAPGTSTEPSEGSAPGSPAGSPTSTEEGTSTEPSEGSAPGTSESATPESGPGSEPATSGSETPGTSESATPESGPGSEPATSGSETPGTSTEPSEGSAPGTSTEPSEGSAPGSEPATSGSETPGTSTEPSEGSAPGTSTEPSEGSAPGSPAGSPTSTEEGTSTEPSEGSAPGTSESATPESGPGTSESATPESGPGTSTEPSEGSAPGTSTEPSEGSAPGSPAGSPTSTEEGSPAGSPTSTEEGTSTEPSEGSAPGSEPATSGSETPGSPAGSPTSTEEGTSTEPSEGSAPGSPAGSPTSTEEGSPAGSPTSTEEGTSESATPESGPGSEPATSGSETPGSEPATSGSETPGTSTEPSEGSAPGSPAGSPTSTEEGSPAGSPTSTEEGTSESATPESGPGSEPATSGSETPGSEPATSGSETPGTSESATPESGPGSEPATSGSETPGSEPATSGSETPGTSESATPESGPGTSESATPESGPGTSESATPESGPGTSESATPESGPGSPAGSPTSTEEGTSTEPSEGSAPGTSESATPESGPGTSTEPSEGSAPGTSTEPSEGSAPGTSESATPESGPGTSTEPSEGSAPGTSESATPESGPGSPAGSPTSTEEGTSTEPSEGSAPGSEPATSGSETPGTSTEPSEGSAPGSEPATSGSETPGTSTEPSEGSAPGTSTEPSEGSAPGSPAGSPTSTEEGTSESATPESGPGTSTEPSEGSAPGSEPATSGSETPGTSESATPESGPGTSESATPESGPGTSESATPESGPGTSTEPSEGSAPGSEPATSGSETPGSPAGSPTSTEEGTSESATPESGPGTSTEPSEGSAPGTSTEPSEGSAPGSPAGSPTSTEEGTSESATPESGPGTSTEPSEGSAPGTSTEPSEGSAPGSPAGSPTSTEEGTSESATPESGPGSPA

SEQ ID NO: 110 - protein, 1024 aa, synthetic construct
  REGION 1..1024: note = Description of Artificial Sequence: Synthetic polypeptide
GTSTEPSEGSAPGTSTEPSEGSAPGTSTEPSEGSAPGTSTEPSEGSAPGSPAGSPTSTEEGSPAGSPTSTEEGTSESATPESGPGSEPATSGSETPGTSTEPSEGSAPGTSESATPESGPGTSTEPSEGSAPGTSESATPESGPGTSESATPESGPGSPAGSPTSTEEGTSTEPSEGSAPGSEPATSGSETPGTSTEPSEGSAPGSPAGSPTSTEEGTSTEPSEGSAPGSPAGSPTSTEEGSPAGSPTSTEEGSPAGSPTSTEEGTSESATPESGPGSEPATSGSETPGTSESATPESGPGTSESATPESGPGSPAGSPTSTEEGTSTEPSEGSAPGSEPATSGSETPGTSTEPSEGSAPGSPAGSPTSTEEGSPAGSPTSTEEGTSTEPSEGSAPGSEPATSGSETPGSPAGSPTSTEEGTSESATPESGPGSEPATSGSETPGSPAGSPTSTEEGTSESATPESGPGTSESATPESGPGTSTEPSEGSAPGSEPATSGSETPGSEPATSGSETPGTSESATPESGPGSEPATSGSETPGTSTEPSEGSAPGSPAGSPTSTEEGTSTEPSEGSAPGSEPATSGSETPGSEPATSGSETPGSPAGSPTSTEEGTSESATPESGPGTSTEPSEGSAPGSPAGSPTSTEEGSPAGSPTSTEEGTSESATPESGPGSPAGSPTSTEEGTSTEPSEGSAPGSEPATSGSETPGSEPATSGSETPGSEPATSGSETPGTSESATPESGPGTSESATPESGPGTSTEPSEGSAPGTSTEPSEGSAPGSEPATSGSETPGTSTEPSEGSAPGTSESATPESGPGSPAGSPTSTEEGSPAGSPTSTEEGTSTEPSEGSAPGTSESATPESGPGSPAGSPTSTEEGTSTEPSEGSAPGSEPATSGSETPGTSESATPESGPGSEPATSGSETPGTSESATPESGPGSEPATSGSETPGSEPATSGSETPGTSTEPSEGSAPGTSESATPESGPGTSTEPSEGSAPGTSTEPSEGSAPGTSESATPESGPGSPA

SEQ ID NO: 111 - protein, 1024 aa, synthetic construct
  REGION 1..1024: note = Description of Artificial Sequence: Synthetic polypeptide
GSEPATSGSETPGTSTEPSEGSAPGSEPATSGSETPGTSTEPSEGSAPGTSESATPESGPGTSESATPESGPGSEPATSGSETPGTSTEPSEGSAPGTSTEPSEGSAPGTSESATPESGPGTSTEPSEGSAPGTSTEPSEGSAPGSEPATSGSETPGSPAGSPTSTEEGTSESATPESGPGTSESATPESGPGTSTEPSEGSAPGTSESATPESGPGSEPATSGSETPGTSESATPESGPGTSESATPESGPGTSTEPSEGSAPGTSTEPSEGSAPGSEPATSGSETPGSPAGSPTSTEEGTSESATPESGPGSEPATSGSETPGSEPATSGSETPGTSESATPESGPGTSESATPESGPGSPAGSPTSTEEGTSTEPSEGSAPGTSESATPESGPGTSTEPSEGSAPGTSTEPSEGSAPGTSESATPESGPGTSTEPSEGSAPGSPAGSPTSTEEGSPAGSPTSTEEGTSESATPESGPGSEPATSGSETPGSEPATSGSETPGTSTEPSEGSAPGTSESATPESGPGSPAGSPTSTEEGSPAGSPTSTEEGTSTEPSEGSAPGSPAGSPTSTEEGSPAGSPTSTEEGTSESATPESGPGSEPATSGSETPGTSTEPSEGSAPGTSTEPSEGSAPGSEPATSGSETPGSPAGSPTSTEEGTSESATPESGPGSPAGSPTSTEEGTSTEPSEGSAPGTSESATPESGPGSEPATSGSETPGTSESATPESGPGTSESATPESGPGSPAGSPTSTEEGTSTEPSEGSAPGSEPATSGSETPGSPAGSPTSTEEGTSTEPSEGSAPGSEPATSGSETPGSEPATSGSETPGTSESATPESGPGTSESATPESGPGTSTEPSEGSAPGTSESATPESGPGSEPATSGSETPGTSESATPESGPGTSESATPESGPGTSTEPSEGSAPGTSESATPESGPGSEPATSGSETPGTSTEPSEGSAPGSPAGSPTSTEEGTSESATPESGPGTSTEPSEGSAPGTSTEPSEGSAPGSPAGSPTSTEEGTST

SEQ ID NO: 112 - protein, 1024 aa, synthetic construct
  REGION 1..1024: note = Description of Artificial Sequence: Synthetic polypeptide
GTSESATPESGPGTSTEPSEGSAPGTSESATPESGPGTSTEPSEGSAPGSEPATSGSETPGSPAGSPTSTEEGTSESATPESGPGSEPATSGSETPGSEPATSGSETPGTSESATPESGPGTSESATPESGPGTSTEPSEGSAPGSEPATSGSETPGSEPATSGSETPGTSESATPESGPGTSESATPESGPGSEPATSGSETPGTSESATPESGPGSPAGSPTSTEEGSPAGSPTSTEEGTSTEPSEGSAPGSEPATSGSETPGSPAGSPTSTEEGTSESATPESGPGSPAGSPTSTEEGTSTEPSEGSAPGSEPATSGSETPGSPAGSPTSTEEGTSESATPESGPGSPAGSPTSTEEGSPAGSPTSTEEGTSTEPSEGSAPGSEPATSGSETPGSPAGSPTSTEEGTSESATPESGPGTSTEPSEGSAPGSPAGSPTSTEEGTSESATPESGPGSEPATSGSETPGTSTEPSEGSAPGSPAGSPTSTEEGTSTEPSEGSAPGTSESATPESGPGTSESATPESGPGTSTEPSEGSAPGTSTEPSEGSAPGSEPATSGSETPGTSESATPESGPGTSESATPESGPGTSTEPSEGSAPGTSTEPSEGSAPGSPAGSPTSTEEGSPAGSPTSTEEGTSTEPSEGSAPGSEPATSGSETPGSEPATSGSETPGTSESATPESGPGSPAGSPTSTEEGTSESATPESGPGTSTEPSEGSAPGTSTEPSEGSAPGSPAGSPTSTEEGSPAGSPTSTEEGTSESATPESGPGSPAGSPTSTEEGTSTEPSEGSAPGSEPATSGSETPGSPAGSPTSTEEGSPAGSPTSTEEGTSTEPSEGSAPGTSESATPESGPGTSESATPESGPGSPAGSPTSTEEGTSTEPSEGSAPGSPAGSPTSTEEGTSTEPSEGSAPGSPAGSPTSTEEGTSTEPSEGSAPGTSTEPSEGSAPGSEPATSGSETPGSPAGSPTSTEEGTSESATPESGPGSEPATSGSETPGSPAGSPTSTEEGTSESATPESGPGTSE

SEQ ID NO: 113 - protein, 1024 aa, synthetic construct
  REGION 1..1024: note = Description of Artificial Sequence: Synthetic polypeptide
GTSESATPESGPGSPAGSPTSTEEGSPAGSPTSTEEGTSESATPESGPGSEPATSGSETPGTSTEPSEGSAPGTSTEPSEGSAPGTSTEPSEGSAPGSPAGSPTSTEEGTSTEPSEGSAPGTSESATPESGPGTSESATPESGPGSPAGSPTSTEEGSPAGSPTSTEEGSPAGSPTSTEEGTSESATPESGPGSEPATSGSETPGTSESATPESGPGTSTEPSEGSAPGTSESATPESGPGTSTEPSEGSAPGTSTEPSEGSAPGTSESATPESGPGSPAGSPTSTEEGTSESATPESGPGTSTEPSEGSAPGSPAGSPTSTEEGTSESATPESGPGSEPATSGSETPGTSTEPSEGSAPGSEPATSGSETPGSEPATSGSETPGTSESATPESGPGTSESATPESGPGTSTEPSEGSAPGTSESATPESGPGSPAGSPTSTEEGTSTEPSEGSAPGSEPATSGSETPGTSESATPESGPGSEPATSGSETPGTSTEPSEGSAPGTSESATPESGPGSPAGSPTSTEEGSPAGSPTSTEEGSPAGSPTSTEEGTSESATPESGPGSEPATSGSETPGTSESATPESGPGTSESATPESGPGSEPATSGSETPGTSTEPSEGSAPGTSTEPSEGSAPGTSTEPSEGSAPGTSESATPESGPGSEPATSGSETPGTSESATPESGPGSEPATSGSETPGTSTEPSEGSAPGSEPATSGSETPGSPAGSPTSTEEGTSESATPESGPGTSESATPESGPGTSESATPESGPGSPAGSPTSTEEGTSTEPSEGSAPGTSESATPESGPGTSESATPESGPGTSTEPSEGSAPGTSTEPSEGSAPGSPAGSPTSTEEGTSESATPESGPGSEPATSGSETPGTSESATPESGPGTSESATPESGPGTSTEPSEGSAPGSEPATSGSETPGTSESATPESGPGSPAGSPTSTEEGTSTEPSEGSAPGSEPATSGSETPGSPAGSPTSTEEGTSESATPESGPGSPAGSPTSTEEGTSTEPSEGSAPGSEP

SEQ ID NO: 114 - protein, 1024 aa, synthetic construct
  REGION 1..1024: note = Description of Artificial Sequence: Synthetic polypeptide
GSEPATSGSETPGTSTEPSEGSAPGTSESATPESGPGSEPATSGSETPGTSTEPSEGSAPGSPAGSPTSTEEGTSESATPESGPGSPAGSPTSTEEGTSTEPSEGSAPGSEPATSGSETPGTSTEPSEGSAPGTSESATPESGPGSEPATSGSETPGSEPATSGSETPGTSESATPESGPGTSTEPSEGSAPGTSESATPESGPGTSESATPESGPGSPAGSPTSTEEGSPAGSPTSTEEGTSESATPESGPGTSESATPESGPGTSTEPSEGSAPGTSTEPSEGSAPGSPAGSPTSTEEGTSTEPSEGSAPGSEPATSGSETPGSEPATSGSETPGSEPATSGSETPGSEPATSGSETPGTSESATPESGPGTSESATPESGPGTSESATPESGPGTSTEPSEGSAPGTSESATPESGPGTSESATPESGPGTSTEPSEGSAPGSPAGSPTSTEEGTSTEPSEGSAPGSEPATSGSETPGSPAGSPTSTEEGTSESATPESGPGTSTEPSEGSAPGSEPATSGSETPGTSESATPESGPGTSESATPESGPGTSTEPSEGSAPGSEPATSGSETPGSPAGSPTSTEEGTSESATPESGPGTSESATPESGPGTSTEPSEGSAPGSEPATSGSETPGSPAGSPTSTEEGTSESATPESGPGSEPATSGSETPGTSTEPSEGSAPGSEPATSGSETPGSPAGSPTSTEEGTSESATPESGPGTSTEPSEGSAPGSEPATSGSETPGTSESATPESGPGTSESATPESGPGSPAGSPTSTEEGTSTEPSEGSAPGSPAGSPTSTEEGSPAGSPTSTEEGSPAGSPTSTEEGTSESATPESGPGSEPATSGSETPGTSTEPSEGSAPGTSTEPSEGSAPGTSESATPESGPGTSTEPSEGSAPGTSESATPESGPGSEPATSGSETPGTSTEPSEGSAPGTSESATPESGPGSPAGSPTSTEEGSPAGSPTSTEEGSPAGSPTSTEEGTSESATPESGPGSPAGSPTSTEEGTSESATPESGPGSEP

SEQ ID NO: 115 - protein, 1024 aa, synthetic construct
  REGION 1..1024: note = Description of Artificial Sequence: Synthetic polypeptide
GTSTEPSEGSAPGSEPATSGSETPGTSTEPSEGSAPGTSTEPSEGSAPGSEPATSGSETPGSPAGSPTSTEEGSPAGSPTSTEEGTSESATPESGPGSEPATSGSETPGTSTEPSEGSAPGTSTEPSEGSAPGSPAGSPTSTEEGTSESATPESGPGTSESATPESGPGSPAGSPTSTEEGTSTEPSEGSAPGTSESATPESGPGTSTEPSEGSAPGSEPATSGSETPGTSESATPESGPGSEPATSGSETPGTSTEPSEGSAPGTSTEPSEGSAPGSPAGSPTSTEEGSPAGSPTSTEEGTSESATPESGPGSPAGSPTSTEEGTSTEPSEGSAPGSEPATSGSETPGSEPATSGSETPGSPAGSPTSTEEGTSESATPESGPGTSTEPSEGSAPGSEPATSGSETPGTSESATPESGPGSEPATSGSETPGSPAGSPTSTEEGTSESATPESGPGTSESATPESGPGSEPATSGSETPGTSESATPESGPGTSESATPESGPGTSESATPESGPGTSTEPSEGSAPGTSESATPESGPGSEPATSGSETPGTSTEPSEGSAPGSPAGSPTSTEEGTSTEPSEGSAPGSEPATSGSETPGSPAGSPTSTEEGTSESATPESGPGTSESATPESGPGTSTEPSEGSAPGTSESATPESGPGTSTEPSEGSAPGTSESATPESGPGSEPATSGSETPGTSTEPSEGSAPGTSTEPSEGSAPGSPAGSPTSTEEGSPAGSPTSTEEGTSESATPESGPGTSTEPSEGSAPGTSESATPESGPGSPAGSPTSTEEGSPAGSPTSTEEGSPAGSPTSTEEGTSTEPSEGSAPGSPAGSPTSTEEGSPAGSPTSTEEGTSESATPESGPGSEPATSGSETPGSEPATSGSETPGTSESATPESGPGSEPATSGSETPGTSESATPESGPGTSTEPSEGSAPGTSTEPSEGSAPGSPAGSPTSTEEGSPAGSPTSTEEGTSESATPESGPGSPAGSPTSTEEGTSTEPSEGSAPGTSESATPESGPGTSE

SEQ ID NO: 116 - protein, 948 aa, synthetic construct
  REGION 1..948: note = Description of Artificial Sequence: Synthetic polypeptide
GSSTPSGATGSPGTPGSGTASSSPGASPGTSSTGSPGSSPSASTGTGPGTPGSGTASSSPGTPGSGTASSSPGTPGSGTASSSPGSSPSASTGTGPGTPGSGTASSSPGSSPSASTGTGPGSSTPSGATGSPGSSTPSGATGSPGSSPSASTGTGPGSSTPSGATGSPGASPGTSSTGSPGASPGTSSTGSPGSSPSASTGTGPGSSPSASTGTGPGASPGTSSTGSPGSSPSASTGTGPGASPGTSSTGSPGSSPSASTGTGPGASPGTSSTGSPGTPGSGTASSSPGTPGSGTASSSPGSSTPSGATGSPGSSTPSGATGSPGSSTPSGATGSPGASPGTSSTGSPGSSPSASTGTGPGASPGTSSTGSPGASPGTSSTGSPGSSTPSGATGSPGSSPSASTGTGPGSSPSASTGTGPGTPGSGTASSSPGASPGTSSTGSPGTPGSGTASSSPGSSTPSGATGSPGSSTPSGATGSPGSSPSASTGTGPGSSPSASTGTGPGSSTPSGATGSPGASPGTSSTGSPGTPGSGTASSSPGSSPSASTGTGPGSSTPSGATGSPGASPGTSSTGSPGSSTPSGATGSPGTPGSGTASSSPGSSPSASTGTGPGSSTPSGATGSPGASPGTSSTGSPGASPGTSSTGSPGTPGSGTASSSPGTPGSGTASSSPGSSPSASTGTGPGASPGTSSTGSPGASPGTSSTGSPGTPGSGTASSSPGTPGSGTASSSPGSSTPSGATGSPGSSPSASTGTGPGSSTPSGATGSPGSSPSASTGTGPGSSPSASTGTGPGTPGSGTASSSPGSSTPSGATGSPGASPGTSSTGSPGTPGSGTASSSPGTPGSGTASSSPGSSTPSGATGSPGTPGSGTASSSPGASPGTSSTGSPGSSTPSGATGSPGSSTPSGATGSPGTPGSGTASSSPGSSTPSGATGSPGSSTPSGATGSP

SEQ ID NO: 117 - protein, 1024 aa, synthetic construct
  REGION 1..1024: note = Description of Artificial Sequence: Synthetic polypeptide
GTPGSGTASSSPGTPGSGTASSSPGSSPSASTGTGPGTPGSGTASSSPGASPGTSSTGSPGTPGSGTASSSPGSSPSASTGTGPGSSTPSGATGSPGASPGTSSTGSPGASPGTSSTGSPGSSPSASTGTGPGSSTPSGATGSPGSSPSASTGTGPGSSPSASTGTGPGTPGSGTASSSPGTPGSGTASSSPGASPGTSSTGSPGSSTPSGATGSPGSSPSASTGTGPGTPGSGTASSSPGASPGTSSTGSPGTPGSGTASSSPGSSPSASTGTGPGSSPSASTGTGPGASPGTSSTGSPGASPGTSSTGSPGSSTPSGATGSPGSSTPSGATGSPGTPGSGTASSSPGSSPSASTGTGPGSSTPSGATGSPGASPGTSSTGSPGSSTPSGATGSPGSSTPSGATGSPGSSPSASTGTGPGASPGTSSTGSPGTPGSGTASSSPGASPGTSSTGSPGSSPSASTGTGPGTPGSGTASSSPGASPGTSSTGSPGASPGTSSTGSPGSSTPSGATGSPGTPGSGTASSSPGSSTPSGATGSPGASPGTSSTGSPGTPGSGTASSSPGTPGSGTASSSPGSSTPSGATGSPGSSTPSGATGSPGTPGSGTASSSPGSSTPSGATGSPGSSTPSGATGSPGASPGTSSTGSPGSSPSASTGTGPGSSPSASTGTGPGASPGTSSTGSPGASPGTSSTGSPGTPGSGTASSSPGSSPSASTGTGPGTPGSGTASSSPGSSTPSGATGSPGSSTPSGATGSPGASPGTSSTGSPGSSPSASTGTGPGASPGTSSTGSPGSSPSASTGTGPGSSPSASTGTGPGASPGTSSTGSPGASPGTSSTGSPGSSTPSGATGSPGASPGTSSTGSPGASPGTSSTGSPGTPGSGTASSSPGTPGSGTASSSPGTPGSGTASSSPGSSTPSGATGSPGSSTPSGATGSPGSSPSASTGTGPGSSPSASTGTGPGTPGSGTASSSPGSSPSASTGTGPGASPGTSSTGSPGSSTPSGATGSPGTPGSGTASSSPGSST

SEQ ID NO: 118 - protein, 1024 aa, synthetic construct
  REGION 1..1024: note = Description of Artificial Sequence: Synthetic polypeptide
GASPGTSSTGSPGSSPSASTGTGPGSSTPSGATGSPGASPGTSSTGSPGASPGTSSTGSPGSSTPSGATGSPGTPGSGTASSSPGASPGTSSTGSPGTPGSGTASSSPGTPGSGTASSSPGSSTPSGATGSPGSSTPSGATGSPGTPGSGTASSSPGSSTPSGATGSPGSSTPSGATGSPGSSPSASTGTGPGSSPSASTGTGPGASPGTSSTGSPGTPGSGTASSSPGASPGTSSTGSPGSSTPSGATGSPGTPGSGTASSSPGSSPSASTGTGPGSSTPSGATGSPGSSPSASTGTGPGSSTPSGATGSPGASPGTSSTGSPGSSPSASTGTGPGTPGSGTASSSPGASPGTSSTGSPGSSTPSGATGSPGASPGTSSTGSPGSSPSASTGTGPGTPGSGTASSSPGTPGSGTASSSPGASPGTSSTGSPGTPGSGTASSSPGTPGSGTASSSPGSSPSASTGTGPGASPGTSSTGSPGSSTPSGATGSPGASPGTSSTGSPGSSPSASTGTGPGTPGSGTASSSPGSSPSASTGTGPGSSPSASTGTGPGASPGTSSTGSPGASPGTSSTGSPGTPGSGTASSSPGASPGTSSTGSPGASPGTSSTGSPGTPGSGTASSSPGTPGSGTASSSPGSSTPSGATGSPGSSTPSGATGSPGTPGSGTASSSPGSSPSASTGTGPGTPGSGTASSSPGSSTPSGATGSPGSSTPSGATGSPGASPGTSSTGSPGTPGSGTASSSPGASPGTSSTGSPGSSTPSGATGSPGSSTPSGATGSPGTPGSGTASSSPGSSTPSGATGSPGSSTPSGATGSPGASPGTSSTGSPGSSPSASTGTGPGSSTPSGATGSPGSSTPSGATGSPGSSPSASTGTGPGSSPSASTGTGPGSSTPSGATGSPGASPGTSSTGSPGSSPSASTGTGPGTPGSGTASSSPGASPGTSSTGSPGSSPSASTGTGPGASPGTSSTGSPGSSTPSGATGSPGSSPSASTGTGPGSSPSASTGTGPGASPGTSSTGSPGSST

SEQ ID NO: 119 - protein, 1024 aa, synthetic construct
  REGION 1..1024: note = Description of Artificial Sequence: Synthetic polypeptide
GSSPSASTGTGPGTPGSGTASSSPGSSPSASTGTGPGSSPSASTGTGPGTPGSGTASSSPGASPGTSSTGSPGSSTPSGATGSPGTPGSGTASSSPGASPGTSSTGSPGTPGSGTASSSPGTPGSGTASSSPGSSPSASTGTGPGSSPSASTGTGPGSSTPSGATGSPGASPGTSSTGSPGSSPSASTGTGPGTPGSGTASSSPGTPGSGTASSSPGSSTPSGATGSPGASPGTSSTGSPGSSPSASTGTGPGTPGSGTASSSPGTPGSGTASSSPGASPGTSSTGSPGSSTPSGATGSPGSSTPSGATGSPGSSPSASTGTGPGSSPSASTGTGPGASPGTSSTGSPGSSPSASTGTGPGSSTPSGATGSPGASPGTSSTGSPGASPGTSSTGSPGSSTPSGATGSPGSSPSASTGTGPGASPGTSSTGSPGASPGTSSTGSPGTPGSGTASSSPGSSTPSGATGSPGASPGTSSTGSPGSSTPSGATGSPGTPGSGTASSSPGSSPSASTGTGPGSSTPSGATGSPGTPGSGTASSSPGSSTPSGATGSPGSSTPSGATGSPGASPGTSSTGSPGSSPSASTGTGPGSSPSASTGTGPGASPGTSSTGSPGSSPSASTGTGPGTPGSGTASSSPGTPGSGTASSSPGASPGTSSTGSPGTPGSGTASSSPGASPGTSSTGSPGTPGSGTASSSPGASPGTSSTGSPGSSTPSGATGSPGASPGTSSTGSPGSSPSASTGTGPGTPGSGTASSSPGTPGSGTASSSPGSSPSASTGTGPGTPGSGTASSSPGASPGTSSTGSPGSSTPSGATGSPGTPGSGTASSSPGASPGTSSTGSPGTPGSGTASSSPGTPGSGTASSSPGSSTPSGATGSPGTPGSGTASSSPGSSPSASTGTGPGSSTPSGATGSPGTPGSGTASSSPGSSTPSGATGSPGSSTPSGATGSPGSSPSASTGTGPGASPGTSSTGSPGTPGSGTASSSPGSSPSASTGTGPGSSPSASTGTGPGASPGTSSTGSPGASP

SEQ ID NO: 120 - protein, 1024 aa, synthetic construct
  REGION 1..1024: note = Description of Artificial Sequence: Synthetic polypeptide
GSSTPSGATGSPGSSPSASTGTGPGTPGSGTASSSPGSSPSASTGTGPGASPGTSSTGSPGSSPSASTGTGPGTPGSGTASSSPGASPGTSSTGSPGSSTPSGATGSPGSSPSASTGTGPGSSTPSGATGSPGASPGTSSTGSPGTPGSGTASSSPGASPGTSSTGSPGSSTPSGATGSPGSSTPSGATGSPGSSPSASTGTGPGTPGSGTASSSPGSSTPSGATGSPGSSTPSGATGSPGSSPSASTGTGPGTPGSGTASSSPGASPGTSSTGSPGTPGSGTASSSPGASPGTSSTGSPGASPGTSSTGSPGTPGSGTASSSPGTPGSGTASSSPGSSTPSGATGSPGSSTPSGATGSPGSSTPSGATGSPGASPGTSSTGSPGSSPSASTGTGPGSSTPSGATGSPGSSPSASTGTGPGSSTPSGATGSPGTPGSGTASSSPGSSPSASTGTGPGSSTPSGATGSPGASPGTSSTGSPGASPGTSSTGSPGSSPSASTGTGPGASPGTSSTGSPGSSTPSGATGSPGASPGTSSTGSPGTPGSGTASSSPGTPGSGTASSSPGSSPSASTGTGPGTPGSGTASSSPGSSTPSGATGSPGSSPSASTGTGPGSSTPSGATGSPGTPGSGTASSSPGTPGSGTASSSPGSSPSASTGTGPGSSTPSGATGSPGSSTPSGATGSPGSSPSASTGTGPGSSPSASTGTGPGASPGTSSTGSPGASPGTSSTGSPGSSTPSGATGSPGASPGTSSTGSPGSSPSASTGTGPGTPGSGTASSSPGASPGTSSTGSPGASPGTSSTGSPGTPGSGTASSSPGTPGSGTASSSPGSSPSASTGTGPGTPGSGTASSSPGASPGTSSTGSPGSSTPSGATGSPGTPGSGTASSSPGTPGSGTASSSPGSSTPSGATGSPGSSTPSGATGSPGTPGSGTASSSPGSSPSASTGTGPGSSPSASTGTGPGASPGTSSTGSPGSSPSASTGTGPGSSPSASTGTGPGASPGTSSTGSPGASPGTSSTGSPGTPG

SEQ ID NO: 121 - protein, 1024 aa, synthetic construct
  REGION 1..1024: note = Description of Artificial Sequence: Synthetic polypeptide
GTPGSGTASSSPGSSTPSGATGSPGASPGTSSTGSPGSSTPSGATGSPGTPGSGTASSSPGTPGSGTASSSPGSSTPSGATGSPGSSTPSGATGSPGASPGTSSTGSPGSSPSASTGTGPGSSTPSGATGSPGASPGTSSTGSPGSSPSASTGTGPGTPGSGTASSSPGASPGTSSTGSPGASPGTSSTGSPGTPGSGTASSSPGTPGSGTASSSPGASPGTSSTGSPGASPGTSSTGSPGTPGSGTASSSPGTPGSGTASSSPGSSPSASTGTGPGSSPSASTGTGPGASPGTSSTGSPGSSPSASTGTGPGSSPSASTGTGPGASPGTSSTGSPGASPGTSSTGSPGTPGSGTASSSPGTPGSGTASSSPGSSPSASTGTGPGASPGTSSTGSPGSSTPSGATGSPGASPGTSSTGSPGSSPSASTGTGPGSSTPSGATGSPGSSPSASTGTGPGSSPSASTGTGPGASPGTSSTGSPGSSPSASTGTGPGSSPSASTGTGPGASPGTSSTGSPGASPGTSSTGSPGSSPSASTGTGPGTPGSGTASSSPGASPGTSSTGSPGSSTPSGATGSPGTPGSGTASSSPGTPGSGTASSSPGSSPSASTGTGPGSSTPSGATGSPGASPGTSSTGSPGASPGTSSTGSPGSSTPSGATGSPGSSPSASTGTGPGASPGTSSTGSPGSSTPSGATGSPGTPGSGTASSSPGASPGTSSTGSPGTPGSGTASSSPGASPGTSSTGSPGSSTPSGATGSPGSSTPSGATGSPGASPGTSSTGSPGSSPSASTGTGPGTPGSGTASSSPGTPGSGTASSSPGSSTPSGATGSPGTPGSGTASSSPGASPGTSSTGSPGSSTPSGATGSPGTPGSGTASSSPGSSPSASTGTGPGSSTPSGATGSPGSSTPSGATGSPGSSPSASTGTGPGSSTPSGATGSPGTPGSGTASSSPGSSPSASTGTGPGTPGSGTASSSPGSSTPSGATGSPGSSPSASTGTGPGSSPSASTGTGPGTPGSGTASSSPGASP

SEQ ID NO: 122 - protein, 1024 aa, synthetic construct
  REGION 1..1024: note = Description of Artificial Sequence: Synthetic polypeptide
GSSTPSGATGSPGTPGSGTASSSPGTPGSGTASSSPGASPGTSSTGSPGSSTPSGATGSPGTPGSGTASSSPGSSTPSGATGSPGSSPSASTGTGPGSSTPSGATGSPGTPGSGTASSSPGTPGSGTASSSPGSSPSASTGTGPGSSTPSGATGSPGSSPSASTGTGPGTPGSGTASSSPGASPGTSSTGSPGSSTPSGATGSPGASPGTSSTGSPGTPGSGTASSSPGSSTPSGATGSPGTPGSGTASSSPGSSPSASTGTGPGASPGTSSTGSPGASPGTSSTGSPGTPGSGTASSSPGSSTPSGATGSPGSSTPSGATGSPGSSPSASTGTGPGSSPSASTGTGPGASPGTSSTGSPGTPGSGTASSSPGTPGSGTASSSPGSSPSASTGTGPGASPGTSSTGSPGASPGTSSTGSPGTPGSGTASSSPGSSPSASTGTGPGASPGTSSTGSPGASPGTSSTGSPGSSTPSGATGSPGSSPSASTGTGPGSSPSASTGTGPGTPGSGTASSSPGTPGSGTASSSPGASPGTSSTGSPGSSTPSGATGSPGTPGSGTASSSPGASPGTSSTGSPGTPGSGTASSSPGTPGSGTASSSPGSSTPSGATGSPGSSTPSGATGSPGTPGSGTASSSPGSSPSASTGTGPGSSTPSGATGSPGSSTPSGATGSPGSSPSASTGTGPGTPGSGTASSSPGSSPSASTGTGPGASPGTSSTGSPGSSPSASTGTGPGTPGSGTASSSPGASPGTSSTGSPGASPGTSSTGSPGTPGSGTASSSPGTPGSGTASSSPGSSTPSGATGSPGTPGSGTASSSPGASPGTSSTGSPGSSTPSGATGSPGSSTPSGATGSPGSSTPSGATGSPGTPGSGTASSSPGSSPSASTGTGPGSSPSASTGTGPGSSPSASTGTGPGASPGTSSTGSPGASPGTSSTGSPGSSPSASTGTGPGTPGSGTASSSPGASPGTSSTGSPGSSTPSGATGSPGASPGTSSTGSPGASPGTSSTGSPGSSTPSGATGSPGTPG

SEQ ID NO: 123 - protein, 1024 aa, synthetic construct
  REGION 1..1024: note = Description of Artificial Sequence: Synthetic polypeptide
GSSTPSGATGSPGSSTPSGATGSPGTPGSGTASSSPGSSPSASTGTGPGTPGSGTASSSPGASPGTSSTGSPGSSTPSGATGSPGASPGTSSTGSPGTPGSGTASSSPGASPGTSSTGSPGSSPSASTGTGPGTPGSGTASSSPGASPGTSSTGSPGSSTPSGATGSPGSSPSASTGTGPGSSTPSGATGSPGASPGTSSTGSPGASPGTSSTGSPGASPGTSSTGSPGSSTPSGATGSPGASPGTSSTGSPGTPGSGTASSSPGSSTPSGATGSPGSSTPSGATGSPGSSPSASTGTGPGSSPSASTGTGPGSSTPSGATGSPGSSPSASTGTGPGSSPSASTGTGPGASPGTSSTGSPGASPGTSSTGSPGTPGSGTASSSPGSSPSASTGTGPGSSPSASTGTGPGASPGTSSTGSPGSSPSASTGTGPGTPGSGTASSSPGSSPSASTGTGPGSSTPSGATGSPGASPGTSSTGSPGSSTPSGATGSPGTPGSGTASSSPGSSPSASTGTGPGASPGTSSTGSPGSSTPSGATGSPGASPGTSSTGSPGASPGTSSTGSPGTPGSGTASSSPGASPGTSSTGSPGASPGTSSTGSPGSSTPSGATGSPGTPGSGTASSSPGSSPSASTGTGPGSSTPSGATGSPGTPGSGTASSSPGSSTPSGATGSPGSSTPSGATGSPGSSPSASTGTGPGSSPSASTGTGPGSSTPSGATGSPGASPGTSSTGSPGSSPSASTGTGPGTPGSGTASSSPGASPGTSSTGSPGSSPSASTGTGPGSSTPSGATGSPGSSPSASTGTGPGSSTPSGATGSPGSSPSASTGTGPGTPGSGTASSSPGTPGSGTASSSPGSSTPSGATGSPGSSTPSGATGSPGTPGSGTASSSPGSSPSASTGTGPGSSTPSGATGSPGSSPSASTGTGPGSSPSASTGTGPGSSTPSGATGSPGASPGTSSTGSPGASPGTSSTGSPGTPGSGTASSSPGTPGSGTASSSPGTPGSGTASSSPGSSTPSGATGSPGSST

SEQ ID NO: 124 - protein, 1024 aa, synthetic construct
  REGION 1..1024: note = Description of Artificial Sequence: Synthetic polypeptide
GASPGTSSTGSPGSSPSASTGTGPGSSTPSGATGSPGSSPSASTGTGPGTPGSGTASSSPGSSTPSGATGSPGSSTPSGATGSPGSSPSASTGTGPGSSTPSGATGSPGTPGSGTASSSPGSSPSASTGTGPGSSTPSGATGSPGASPGTSSTGSPGSSPSASTGTGPGSSPSASTGTGPGTPGSGTASSSPGASPGTSSTGSPGSSTPSGATGSPGSSPSASTGTGPGASPGTSSTGSPGSSTPSGATGSPGTPGSGTASSSPGSSPSASTGTGPGSSPSASTGTGPGSSPSASTGTGPGTPGSGTASSSPGTPGSGTASSSPGSSTPSGATGSPGTPGSGTASSSPGSSPSASTGTGPGASPGTSSTGSPGASPGTSSTGSPGTPGSGTASSSPGSSPSASTGTGPGASPGTSSTGSPGTPGSGTASSSPGSSTPSGATGSPGSSTPSGATGSPGASPGTSSTGSPGTPGSGTASSSPGSSPSASTGTGPGTPGSGTASSSPGASPGTSSTGSPGSSTPSGATGSPGASPGTSSTGSPGASPGTSSTGSPGTPGSGTASSSPGTPGSGTASSSPGSSPSASTGTGPGSSPSASTGTGPGSSPSASTGTGPGTPGSGTASSSPGASPGTSSTGSPGSSTPSGATGSPGASPGTSSTGSPGSSPSASTGTGPGASPGTSSTGSPGSSPSASTGTGPGASPGTSSTGSPGSSPSASTGTGPGSSPSASTGTGPGTPGSGTASSSPGASPGTSSTGSPGTPGSGTASSSPGTPGSGTASSSPGASPGTSSTGSPGSSTPSGATGSPGSSTPSGATGSPGSSPSASTGTGPGSSTPSGATGSPGTPGSGTASSSPGSSPSASTGTGPGSSTPSGATGSPGSSTPSGATGSPGSSPSASTGTGPGSSPSASTGTGPGASPGTSSTGSPGTPGSGTASSSPGSSPSASTGTGPGSSTPSGATGSPGASPGTSSTGSPGASPGTSSTGSPGSSPSASTGTGPGASPGTSSTGSPGASPGTSSTGSPGTPG

SEQ ID NO: 125 - protein, 1024 aa, synthetic construct
  REGION 1..1024: note = Description of Artificial Sequence: Synthetic polypeptide
GSSTPSGATGSPGSSPSASTGTGPGASPGTSSTGSPGASPGTSSTGSPGTPGSGTASSSPGSSPSASTGTGPGASPGTSSTGSPGSSTPSGATGSPGSSTPSGATGSPGASPGTSSTGSPGSSPSASTGTGPGTPGSGTASSSPGTPGSGTASSSPGASPGTSSTGSPGSSTPSGATGSPGSSTPSGATGSPGSSPSASTGTGPGTPGSGTASSSPGASPGTSSTGSPGSSTPSGATGSPGTPGSGTASSSPGSSPSASTGTGPGSSTPSGATGSPGTPGSGTASSSPGSSPSASTGTGPGTPGSGTASSSPGASPGTSSTGSPGSSTPSGATGSPGSSTPSGATGSPGTPGSGTASSSPGSSTPSGATGSPGSSTPSGATGSPGASPGTSSTGSPGASPGTSSTGSPGASPGTSSTGSPGSSTPSGATGSPGTPGSGTASSSPGSSPSASTGTGPGTPGSGTASSSPGASPGTSSTGSPGTPGSGTASSSPGASPGTSSTGSPGSSTPSGATGSPGSSPSASTGTGPGSSPSASTGTGPGTPGSGTASSSPGASPGTSSTGSPGASPGTSSTGSPGTPGSGTASSSPGASPGTSSTGSPGSSTPSGATGSPGSSTPSGATGSPGSSPSASTGTGPGASPGTSSTGSPGASPGTSSTGSPGTPGSGTASSSPGTPGSGTASSSPGSSTPSGATGSPGSSPSASTGTGPGSSPSASTGTGPGASPGTSSTGSPGASPGTSSTGSPGSSTPSGATGSPGSSPSASTGTGPGASPGTSSTGSPGSSTPSGATGSPGTPGSGTASSSPGSSPSASTGTGPGASPGTSSTGSPGSSTPSGATGSPGTPGSGTASSSPGSSTPSGATGSPGSSTPSGATGSPGSSTPSGATGSPGSSPSASTGTGPGSSPSASTGTGPGSSTPSGATGSPGSSPSASTGTGPGSSPSASTGTGPGSSTPSGATGSPGASPGTSSTGSPGASPGTSSTGSPGTPGSGTASSSPGASPGTSSTGSPGSSTPSGATGSPGASP

SEQ ID NO: 126 - protein, 1024 aa, synthetic construct
  REGION 1..1024: note = Description of Artificial Sequence: Synthetic polypeptide
GSSPSASTGTGPGSSPSASTGTGPGSSPSASTGTGPGTPGSGTASSSPGSSPSASTGTGPGSSPSASTGTGPGASPGTSSTGSPGSSPSASTGTGPGTPGSGTASSSPGTPGSGTASSSPGASPGTSSTGSPGTPGSGTASSSPGTPGSGTASSSPGSSPSASTGTGPGSSTPSGATGSPGSSPSASTGTGPGASPGTSSTGSPGSSPSASTGTGPGASPGTSSTGSPGASPGTSSTGSPGTPGSGTASSSPGTPGSGTASSSPGASPGTSSTGSPGTPGSGTASSSPGTPGSGTASSSPGSSPSASTGTGPGSSTPSGATGSPGASPGTSSTGSPGSSTPSGATGSPGSSPSASTGTGPGSSPSASTGTGPGSSTPSGATGSPGASPGTSSTGSPGSSPSASTGTGPGTPGSGTASSSPGASPGTSSTGSPGASPGTSSTGSPGTPGSGTASSSPGTPGSGTASSSPGSSTPSGATGSPGTPGSGTASSSPGASPGTSSTGSPGSSTPSGATGSPGTPGSGTASSSPGSSPSASTGTGPGSSPSASTGTGPGSSTPSGATGSPGASPGTSSTGSPGASPGTSSTGSPGTPGSGTASSSPGTPGSGTASSSPGSSTPSGATGSPGSSPSASTGTGPGSSPSASTGTGPGASPGTSSTGSPGASPGTSSTGSPGSSTPSGATGSPGASPGTSSTGSPGASPGTSSTGSPGTPGSGTASSSPGTPGSGTASSSPGTPGSGTASSSPGSSTPSGATGSPGSSTPSGATGSPGSSPSASTGTGPGSSPSASTGTGPGSSTPSGATGSPGTPGSGTASSSPGSSPSASTGTGPGASPGTSSTGSPGSSTPSGATGSPGSSPSASTGTGPGSSTPSGATGSPGASPGTSSTGSPGSSPSASTGTGPGTPGSGTASSSPGSSPSASTGTGPGSSTPSGATGSPGASPGTSSTGSPGSSPSASTGTGPGTPGSGTASSSPGSSTPSGATGSPGSSTPSGATGSPGASPGTSSTGSPGSSPSASTGTGPGSSP

SEQ ID NO: 127 - protein, 1024 aa, synthetic construct
  REGION 1..1024: note = Description of Artificial Sequence: Synthetic polypeptide
GSSPSASTGTGPGTPGSGTASSSPGSSTPSGATGSPGTPGSGTASSSPGSSTPSGATGSPGSSTPSGATGSPGSSPSASTGTGPGSSPSASTGTGPGSSPSASTGTGPGTPGSGTASSSPGASPGTSSTGSPGSSTPSGATGSPGTPGSGTASSSPGTPGSGTASSSPGSSTPSGATGSPGSSTPSGATGSPGSSPSASTGTGPGASPGTSSTGSPGASPGTSSTGSPGASPGTSSTGSPGASPGTSSTGSPGTPGSGTASSSPGTPGSGTASSSPGSSPSASTGTGPGSSTPSGATGSPGASPGTSSTGSPGSSTPSGATGSPGSSTPSGATGSPGSSPSASTGTGPGASPGTSSTGSPGTPGSGTASSSPGSSPSASTGTGPGSSPSASTGTGPGASPGTSSTGSPGASPGTSSTGSPGTPGSGTASSSPGASPGTSSTGSPGTPGSGTASSSPGTPGSGTASSSPGSSTPSGATGSPGTPGSGTASSSPGASPGTSSTGSPGSSTPSGATGSPGSSTPSGATGSPGSSPSASTGTGPGSSTPSGATGSPGSSTPSGATGSPGASPGTSSTGSPGSSPSASTGTGPGTPGSGTASSSPGASPGTSSTGSPGSSPSASTGTGPGTPGSGTASSSPGSSPSASTGTGPGTPGSGTASSSPGASPGTSSTGSPGASPGTSSTGSPGTPGSGTASSSPGTPGSGTASSSPGSSTPSGATGSPGSSTPSGATGSPGTPGSGTASSSPGSSTPSGATGSPGSSTPSGATGSPGASPGTSSTGSPGSSPSASTGTGPGSSTPSGATGSPGSSPSASTGTGPGSSPSASTGTGPGASPGTSSTGSPGSSTPSGATGSPGASPGTSSTGSPGTPGSGTASSSPGTPGSGTASSSPGSSPSASTGTGPGASPGTSSTGSPGSSTPSGATGSPGSSPSASTGTGPGSSPSASTGTGPGASPGTSSTGSPGTPGSGTASSSPGSSTPSGATGSPGTPGSGTASSSPGSSPSASTGTGPGSSPSASTGTGPGASP

SEQ ID NO: 128 - protein, 72 aa, synthetic construct
  REGION 1..72: note = Description of Artificial Sequence: Synthetic polypeptide
SPAGSPTSTEEGSPAGSPTSTEEGTSESATPESGPGTSTEPSEGSAPGTSESATPESGPGSEPATSGSETPG

SEQ ID NO: 129 - protein, 72 aa, synthetic construct
  REGION 1..72: note = Description of Artificial Sequence: Synthetic polypeptide
TSESATPESGPGTSESATPESGPGSEPATSGSETPGSEPATSGSETPGSPAGSPTSTEEGTSTEPSEGSAPG

SEQ ID NO: 130 - protein, 108 aa, synthetic construct
  REGION 1..108: note = Description of Artificial Sequence: Synthetic polypeptide
TEEGTSESATPESGPGTSTEPSEGSAPGSPAGSPTSTEEGTSTEPSEGSAPGTSTEPSEGSAPGTSESATPESGPGSEPATSGSETPGSEPATSGSETPGSPAGSPTS

SEQ ID NO: 131 - protein, 108 aa, synthetic construct
  REGION 1..108: note = Description of Artificial Sequence: Synthetic polypeptide
GSPAGSPTSTEEGTSTEPSEGSAPGTSESATPESGPGTSESATPESGPGTSESATPESGPGSEPATSGSETPGSEPATSGSETPGSPAGSPTSTEEGTSTEPSEGSAP

SEQ ID NO: 132 - protein, 144 aa, synthetic construct
  REGION 1..144: note = Description of Artificial Sequence: Synthetic polypeptide
STEPSEGSAPGSPAGSPTSTEEGTSTEPSEGSAPGTSESATPESGPGSEPATSGSETPGTSESATPESGPGSEPATSGSETPGTSESATPESGPGTSTEPSEGSAPGTSESATPESGPGSPAGSPTSTEEGSPAGSPTSTEEGS

SEQ ID NO: 133 - protein, 144 aa, synthetic construct
  REGION 1..144: note = Description of Artificial Sequence: Synthetic polypeptide
SEPATSGSETPGTSESATPESGPGSEPATSGSETPGTSESATPESGPGTSTEPSEGSAPGSPAGSPTSTEEGTSESATPESGPGSEPATSGSETPGTSESATPESGPGSPAGSPTSTEEGSPAGSPTSTEEGTSTEPSEGSAPG

SEQ ID NO: 134 - protein, 180 aa, synthetic construct
  REGION 1..180: note = Description of Artificial Sequence: Synthetic polypeptide
TSTEEGTSESATPESGPGSEPATSGSETPGTSESATPESGPGSPAGSPTSTEEGSPAGSPTSTEEGTSTEPSEGSAPGTSESATPESGPGTSESATPESGPGTSESATPESGPGSEPATSGSETPGSEPATSGSETPGSPAGSPTSTEEGTSTEPSEGSAPGTSTEPSEGSAPGSEPATS

SEQ ID NO: 135 - protein, 216 aa, synthetic construct
  REGION 1..216: note = Description of Artificial Sequence: Synthetic polypeptide
PESGPGTSTEPSEGSAPGSPAGSPTSTEEGTSESATPESGPGSEPATSGSETPGTSESATPESGPGSPAGSPTSTEEGSPAGSPTSTEEGTSTEPSEGSAPGTSESATPESGPGTSESATPESGPGTSESATPESGPGSEPATSGSETPGSEPATSGSETPGSPAGSPTSTEEGTSTEPSEGSAPGTSTEPSEGSAPGSEPATSGSETPGTSESAT

SEQ ID NO: 136 - protein, 252 aa, synthetic construct
  REGION 1..252: note = Description of Artificial Sequence: Synthetic polypeptide
ESGPGSEPATSGSETPGTSESATPESGPGTSTEPSEGSAPGSPAGSPTSTEEGTSESATPESGPGSEPATSGSETPGTSESATPESGPGSPAGSPTSTEEGSPAGSPTSTEEGTSTEPSEGSAPGTSESATPESGPGTSESATPESGPGTSESATPESGPGSEPATSGSETPGSEPATSGSETPGSPAGSPTSTEEGTSTEPSEGSAPGTSTEPSEGSAPGSEPATSGSETPGTSESATPESGPGTSTEPSE

SEQ ID NO: 137 - protein, 288 aa, synthetic construct
  REGION 1..288: note = Description of Artificial Sequence: Synthetic polypeptide
TPESGPGTSTEPSEGSAPGTSESATPESGPGSEPATSGSETPGTSESATPESGPGSEPATSGSETPGTSESATPESGPGTSTEPSEGSAPGSPAGSPTSTEEGTSESATPESGPGSEPATSGSETPGTSESATPESGPGSPAGSPTSTEEGSPAGSPTSTEEGTSTEPSEGSAPGTSESATPESGPGTSESATPESGPGTSESATPESGPGSEPATSGSETPGSEPATSGSETPGSPAGSPTSTEEGTSTEPSEGSAPGTSTEPSEGSAPGSEPATSGSETPGTSESA

SEQ ID NO: 138 - protein, 324 aa, synthetic construct
  REGION 1..324: note = Description of Artificial Sequence: Synthetic polypeptide
PESGPGSPAGSPTSTEEGSPAGSPTSTEEGSPAGSPTSTEEGTSESATPESGPGTSTEPSEGSAPGTSESATPESGPGSEPATSGSETPGTSESATPESGPGSEPATSGSETPGTSESATPESGPGTSTEPSEGSAPGSPAGSPTSTEEGTSESATPESGPGSEPATSGSETPGTSESATPESGPGSPAGSPTSTEEGSPAGSPTSTEEGTSTEPSEGSAPGTSESATPESGPGTSESATPESGPGTSESATPESGPGSEPATSGSETPGSEPATSGSETPGSPAGSPTSTEEGTSTEPSEGSAPGTSTEPSEGSAPGSEPATS

SEQ ID NO: 139 - protein, 360 aa, synthetic construct
  REGION 1..360: note = Description of Artificial Sequence: Synthetic polypeptide
PESGPGTSTEPSEGSAPGTSESATPESGPGSPAGSPTSTEEGSPAGSPTSTEEGSPAGSPTSTEEGTSESATPESGPGTSTEPSEGSAPGTSESATPESGPGSEPATSGSETPGTSESATPESGPGSEPATSGSETPGTSESATPESGPGTSTEPSEGSAPGSPAGSPTSTEEGTSESATPESGPGSEPATSGSETPGTSESATPESGPGSPAGSPTSTEEGSPAGSPTSTEEGTSTEPSEGSAPGTSESATPESGPGTSESATPESGPGTSESATPESGPGSEPATSGSETPGSEPATSGSETPGSPAGSPTSTEEGTSTEPSEGSAPGTSTEPSEGSAPGSEPATSGSETPGTSESAT

SEQ ID NO: 140 - protein, 360 aa, synthetic construct
  REGION 1..360: note = Description of Artificial Sequence: Synthetic polypeptide
PESGPGSEPATSGSETPGTSESATPESGPGTSTEPSEGSAPGTSESATPESGPGSPAGSPTSTEEGSPAGSPTSTEEGSPAGSPTSTEEGTSESATPESGPGTSTEPSEGSAPGTSESATPESGPGSEPATSGSETPGTSESATPESGPGSEPATSGSETPGTSESATPESGPGTSTEPSEGSAPGSPAGSPTSTEEGTSESATPESGPGSEPATSGSETPGTSESATPESGPGSPAGSPTSTEEGSPAGSPTSTEEGTSTEPSEGSAPGTSESATPESGPGTSESATPESGPGTSESATPESGPGSEPATSGSETPGSEPATSGSETPGSPAGSPTSTEEGTSTEPSEGSAPGTSTEPS

SEQ ID NO: 141 - protein, 432 aa, synthetic construct
  REGION 1..432: note = Description of Artificial Sequence: Synthetic polypeptide
EGSAPGSPAGSPTSTEEGTSTEPSEGSAPGTSESATPESGPGSEPATSGSETPGTSESATPESGPGSEPATSGSETPGTSESATPESGPGTSTEPSEGSAPGTSESATPESGPGSPAGSPTSTEEGSPAGSPTSTEEGSPAGSPTSTEEGTSESATPESGPGTSTEPSEGSAPGTSESATPESGPGSEPATSGSETPGTSESATPESGPGSEPATSGSETPGTSESATPESGPGTSTEPSEGSAPGSPAGSPTSTEEGTSESATPESGPGSEPATSGSETPGTSESATPESGPGSPAGSPTSTEEGSPAGSPTSTEEGTSTEPSEGSAPGTSESATPESGPGTSESATPESGPGTSESATPESGPGSEPATSGSETPGSEPATSGSETPGSPAGSPTSTEEGTSTEPSEGSAPGTSTEPSEGSAPGSEPATS

SEQ ID NO: 142 - protein, 468 aa, synthetic construct
  REGION 1..468: note = Description of Artificial Sequence: Synthetic polypeptide
EGSAPGTSTEPSEGSAPGTSTEPSEGSAPGSPAGSPTSTEEGTSTEPSEGSAPGTSESATPESGPGSEPATSGSETPGTSESATPESGPGSEPATSGSETPGTSESATPESGPGTSTEPSEGSAPGTSESATPESGPGSPAGSPTSTEEGSPAGSPTSTEEGSPAGSPTSTEEGTSESATPESGPGTSTEPSEGSAPGTSESATPESGPGSEPATSGSETPGTSESATPESGPGSEPATSGSETPGTSESATPESGPGTSTEPSEGSAPGSPAGSPTSTEEGTSESATPESGPGSEPATSGSETPGTSESATPESGPGSPAGSPTSTEEGSPAGSPTSTEEGTSTEPSEGSAPGTSESATPESGPGTSESATPESGPGTSESATPESGPGSEPATSGSETPGSEPATSGSETPGSPAGSPTSTEEGTSTEPSEGSAPGTSTEPSEGSAPGSEPATSGSETPGTSESAT

SEQ ID NO: 143 - protein, 504 aa, synthetic construct
  REGION 1..504: note = Description of Artificial Sequence: Synthetic polypeptide
EGSAPGTSTEPSEGSAPGTSTEPSEGSAPGTSTEPSEGSAPGTSTEPSEGSAPGSPAGSPTSTEEGTSTEPSEGSAPGTSESATPESGPGSEPATSGSETPGTSESATPESGPGSEPATSGSETPGTSESATPESGPGTSTEPSEGSAPGTSESATPESGPGSPAGSPTSTEEGSPAGSPTSTEEGSPAGSPTSTEEGTSESATPESGPGTSTEPSEGSAPGTSESATPESGPGSEPATSGSETPGTSESATPESGPGSEPATSGSETPGTSESATPESGPGTSTEPSEGSAPGSPAGSPTSTEEGTSESATPESGPGSEPATSGSETPGTSESATPESGPGSPAGSPTSTEEGSPAGSPTSTEEGTSTEPSEGSAPGTSESATPESGPGTSESATPESGPGTSESATPESGPGSEPATSGSETPGSEPATSGSETPGSPAGSPTSTEEGTSTEPSEGSAPGTSTEPSEGSAPGSEPATSGSETPGTSESATPESGPGTSTEPS

SEQ ID NO: 144 - protein, 540 aa, synthetic construct
  REGION 1..540: note = Description of Artificial Sequence: Synthetic polypeptide
TPESGPGSPAGSPTSTEEGTSESATPESGPGSEPATSGSETPGTSESATPESGPGTSTEPSEGSAPGTSTEPSEGSAPGTSTEPSEGSAPGTSTEPSEGSAPGTSTEPSEGSAPGTSTEPSEGSAPGSPAGSPTSTEEGTSTEPSEGSAPGTSESATPESGPGSEPATSGSETPGTSESATPESGPGSEPATSGSETPGTSESATPESGPGTSTEPSEGSAPGTSESATPESGPGSPAGSPTSTEEGSPAGSPTSTEEGSPAGSPTSTEEGTSESATPESGPGTSTEPSEGSAPGTSESATPESGPGSEPATSGSETPGTSESATPESGPGSEPATSGSETPGTSESATPESGPGTSTEPSEGSAPGSPAGSPTSTEEGTSESATPESGPGSEPATSGSETPGTSESATPESGPGSPAGSPTSTEEGSPAGSPTSTEEGTSTEPSEGSAPGTSESATPESGPGTSESATPESGPGTSESATPESGPGSEPATSGSETPGSEPATSGSETPGSPAGSPTSTEEGTSTEPSEGSAPGTSTEP

SEQ ID NO: 145 - protein, 576 aa, synthetic construct
  REGION 1..576: note = Description of Artificial Sequence: Synthetic polypeptide
TPESGPGTSESATPESGPGSPAGSPTSTEEGTSESATPESGPGSEPATSGSETPGTSESATPESGPGTSTEPSEGSAPGTSTEPSEGSAPGTSTEPSEGSAPGTSTEPSEGSAPGTSTEPSEGSAPGTSTEPSEGSAPGSPAGSPTSTEEGTSTEPSEGSAPGTSESATPESGPGSEPATSGSETPGTSESATPESGPGSEPATSGSETPGTSESATPESGPGTSTEPSEGSAPGTSESATPESGPGSPAGSPTSTEEGSPAGSPTSTEEGSPAGSPTSTEEGTSESATPESGPGTSTEPSEGSAPGTSESATPESGPGSEPATSGSETPGTSESATPESGPGSEPATSGSETPGTSESATPESGPGTSTEPSEGSAPGSPAGSPTSTEEGTSESATPESGPGSEPATSGSETPGTSESATPESGPGSPAGSPTSTEEGSPAGSPTSTEEGTSTEPSEGSAPGTSESATPESGPGTSESATPESGPGTSESATPESGPGSEPATSGSETPGSEPATSGSETPGSPAGSPTSTEEGTSTEPSEGSAPGTSTEPSEGSAPGSEPATSGSETPGTSESA

SEQ ID NO: 146 - protein, 612 aa, synthetic construct
  REGION 1..612: note = Description of Artificial Sequence: Synthetic polypeptide
GSETPGTSTEPSEGSAPGTSTEPSEGSAPGTSESATPESGPGTSESATPESGPGSPAGSPTSTEEGTSESATPESGPGSEPATSGSETPGTSESATPESGPGTSTEPSEGSAPGTSTEPSEGSAPGTSTEPSEGSAPGTSTEPSEGSAPGTSTEPSEGSAPGTSTEPSEGSAPGSPAGSPTSTEEGTSTEPSEGSAPGTSESATPESGPGSEPATSGSETPGTSESATPESGPGSEPATSGSETPGTSESATPESGPGTSTEPSEGSAPGTSESATPESGPGSPAGSPTSTEEGSPAGSPTSTEEGSPAGSPTSTEEGTSESATPESGPGTSTEPSEGSAPGTSESATPESGPGSEPATSGSETPGTSESATPESGPGSEPATSGSETPGTSESATPESGPGTSTEPSEGSAPGSPAGSPTSTEEGTSESATPESGPGSEPATSGSETPGTSESATPESGPGSPAGSPTSTEEGSPAGSPTSTEEGTSTEPSEGSAPGTSESATPESGPGTSESATPESGPGTSESATPESGPGSEPATSGSETPGSEPATSGSETPGSPAGSPTSTEEGTSTEPSEGSAPGTSTEPSEGSAPGSEPATSGSETPGTSESAT

SEQ ID NO: 147 - protein, 648 aa, synthetic construct
  REGION 1..648: note = Description of Artificial Sequence: Synthetic polypeptide
PESGPGTSTEPSEGSAPGTSESATPESGPGSEPATSGSETPGTSTEPSEGSAPGTSTEPSEGSAPGTSESATPESGPGTSESATPESGPGSPAGSPTSTEEGTSESATPESGPGSEPATSGSETPGTSESATPESGPGTSTEPSEGSAPGTSTEPSEGSAPGTSTEPSEGSAPGTSTEPSEGSAPGTSTEPSEGSAPGTSTEPSEGSAPGSPAGSPTSTEEGTSTEPSEGSAPGTSESATPESGPGSEPATSGSETPGTSESATPESGPGSEPATSGSETPGTSESATPESGPGTSTEPSEGSAPGTSESATPESGPGSPAGSPTSTEEGSPAGSPTSTEEGSPAGSPTSTEEGTSESATPESGPGTSTEPSEGSAPGTSESATPESGPGSEPATSGSETPGTSESATPESGPGSEPATSGSETPGTSESATPESGPGTSTEPSEGSAPGSPAGSPTSTEEGTSESATPESGPGSEPATSGSETPGTSESATPESGPGSPAGSPTSTEEGSPAGSPTSTEEGTSTEPSEGSAPGTSESATPESGPGTSESATPESGPGTSESATPESGPGSEPATSGSETPGSEPATSGSETPGSPAGSPTSTEEGTSTEPSEGSAPGTSTEPSEGSAPGSEPATSGSETPGTSESAT

SEQ ID NO: 148 - protein, 684 aa, synthetic construct
  REGION 1..684: note = Description of Artificial Sequence: Synthetic polypeptide
EGSAPGSPAGSPTSTEEGTSTEPSEGSAPGTSTEPSEGSAPGTSESATPESGPGTSTEPSEGSAPGTSESATPESGPGSEPATSGSETPGTSTEPSEGSAPGTSTEPSEGSAPGTSESATPESGPGTSESATPESGPGSPAGSPTSTEEGTSESATPESGPGSEPATSGSETPGTSESATPESGPGTSTEPSEGSAPGTSTEPSEGSAPGTSTEPSEGSAPGTSTEPSEGSAPGTSTEPSEGSAPGTSTEPSEGSAPGSPAGSPTSTEEGTSTEPSEGSAPGTSESATPESGPGSEPATSGSETPGTSESATPESGPGSEPATSGSETPGTSESATPESGPGTSTEPSEGSAPGTSESATPESGPGSPAGSPTSTEEGSPAGSPTSTEEGSPAGSPTSTEEGTSESATPESGPGTSTEPSEGSAPGTSESATPESGPGSEPATSGSETPGTSESATPESGPGSEPATSGSETPGTSESATPESGPGTSTEPSEGSAPGSPAGSPTSTEEGTSESATPESGPGSEPATSGSETPGTSESATPESGPGSPAGSPTSTEEGSPAGSPTSTEEGTSTEPSEGSAPGTSESATPESGPGTSESATPESGPGTSESATPESGPGSEPATSGSETPGSEPATSGSETPGSPAGSPTSTEEGTSTEPSEGSAPGTSTEPSEGSAPGSEPATS

SEQ ID NO: 149 - protein, 720 aa, synthetic construct
  REGION 1..720: note = Description of Artificial Sequence: Synthetic polypeptide
TSGSETPGSEPATSGSETPGSPAGSPTSTEEGTSESATPESGPGTSTEPSEGSAPGTSTEPSEGSAPGSPAGSPTSTEEGTSTEPSEGSAPGTSTEPSEGSAPGTSESATPESGPGTSTEPSEGSAPGTSESATPESGPGSEPATSGSETPGTSTEPSEGSAPGTSTEPSEGSAPGTSESATPESGPGTSESATPESGPGSPAGSPTSTEEGTSESATPESGPGSEPATSGSETPGTSESATPESGPGTSTEPSEGSAPGTSTEPSEGSAPGTSTEPSEGSAPGTSTEPSEGSAPGTSTEPSEGSAPGTSTEPSEGSAPGSPAGSPTSTEEGTSTEPSEGSAPGTSESATPESGPGSEPATSGSETPGTSESATPESGPGSEPATSGSETPGTSESATPESGPGTSTEPSEGSAPGTSESATPESGPGSPAGSPTSTEEGSPAGSPTSTEEGSPAGSPTSTEEGTSESATPESGPGTSTEPSEGSAPGTSESATPESGPGSEPATSGSETPGTSESATPESGPGSEPATSGSETPGTSESATPESGPGTSTEPSEGSAPGSPAGSPTSTEEGTSESATPESGPGSEPATSGSETPGTSESATPESGPGSPAGSPTSTEEGSPAGSPTSTEEGTSTEPSEGSAPGTSESATPESGPGTSESATPESGPGTSESATPESGPGSEPATSGSETPGSEPATSGSETPGSPAGSPTSTEEGTSTE

SEQ ID NO: 150 - protein, 756 aa, synthetic construct
  REGION 1..756: note = Description of Artificial Sequence: Synthetic polypeptide
TSGSETPGSEPATSGSETPGSPAGSPTSTEEGTSESATPESGPGTSTEPSEGSAPGTSTEPSEGSAPGSPAGSPTSTEEGTSTEPSEGSAPGTSTEPSEGSAPGTSESATPESGPGTSTEPSEGSAPGTSESATPESGPGSEPATSGSETPGTSTEPSEGSAPGTSTEPSEGSAPGTSESATPESGPGTSESATPESGPGSPAGSPTSTEEGTSESATPESGPGSEPATSGSETPGTSESATPESGPGTSTEPSEGSAPGTSTEPSEGSAPGTSTEPSEGSAPGTSTEPSEGSAPGTSTEPSEGSAPGTSTEPSEGSAPGSPAGSPTSTEEGTSTEPSEGSAPGTSESATPESGPGSEPATSGSETPGTSESATPESGPGSEPATSGSETPGTSESATPESGPGTSTEPSEGSAPGTSESATPESGPGSPAGSPTSTEEGSPAGSPTSTEEGSPAGSPTSTEEGTSESATPESGPGTSTEPSEGSAPGTSESATPESGPGSEPATSGSETPGTSESATPESGPGSEPATSGSETPGTSESATPESGPGTSTEPSEGSAPGSPAGSPTSTEEGTSESATPESGPGSEPATSGSETPGTSESATPESGPGSPAGSPTSTEEGSPAGSPTSTEEGTSTEPSEGSAPGTSESATPESGPGTSESATPESGPGTSESATPESGPGSEPATSGSETPGSEPATSGSETPGSPAGSPTSTEEGTSTEPSEGSAPGTSTEPSEGSAPGSEPATSGSETPGTSES

SEQ ID NO: 151 - protein, 792 aa, synthetic construct
  REGION 1..792: note = Description of Artificial Sequence: Synthetic polypeptide
EGSAPGTSESATPESGPGSEPATSGSETPGSEPATSGSETPGSPAGSPTSTEEGTSESATPESGPGTSTEPSEGSAPGTSTEPSEGSAPGSPAGSPTSTEEGTSTEPSEGSAPGTSTEPSEGSAPGTSESATPESGPGTSTEPSEGSAPGTSESATPESGPGSEPATSGSETPGTSTEPSEGSAPGTSTEPSEGSAPGTSESATPESGPGTSESATPESGPGSPAGSPTSTEEGTSESATPESGPGSEPATSGSETPGTSESATPESGPGTSTEPSEGSAPGTSTEPSEGSAPGTSTEPSEGSAPGTSTEPSEGSAPGTSTEPSEGSAPGTSTEPSEGSAPGSPAGSPTSTEEGTSTEPSEGSAPGTSESATPESGPGSEPATSGSETPGTSESATPESGPGSEPATSGSETPGTSESATPESGPGTSTEPSEGSAPGTSESATPESGPGSPAGSPTSTEEGSPAGSPTSTEEGSPAGSPTSTEEGTSESATPESGPGTSTEPSEGSAPGTSESATPESGPGSEPATSGSETPGTSESATPESGPGSEPATSGSETPGTSESATPESGPGTSTEPSEGSAPGSPAGSPTSTEEGTSESATPESGPGSEPATSGSETPGTSESATPESGPGSPAGSPTSTEEGSPAGSPTSTEEGTSTEPSEGSAPGTSESATPESGPGTSESATPESGPGTSESATPESGPGSEPATSGSETPGSEPATSGSETPGSPAGSPTSTEEGTSTEPSEGSAPGTSTEPSEGSAPGSEPATSGSETPGTSESATPESGPGTSTEPS

SEQ ID NO: 152 - protein, 828 aa, synthetic construct
  REGION 1..828: note = Description of Artificial Sequence: Synthetic polypeptide
PESGPGTSTEPSEGSAPGSPAGSPTSTEEGTSTEPSEGSAPGTSTEPSEGSAPGTSESATPESGPGSEPATSGSETPGSEPATSGSETPGSPAGSPTSTEEGTSESATPESGPGTSTEPSEGSAPGTSTEPSEGSAPGSPAGSPTSTEEGTSTEPSEGSAPGTSTEPSEGSAPGTSESATPESGPGTSTEPSEGSAPGTSESATPESGPGSEPATSGSETPGTSTEPSEGSAPGTSTEPSEGSAPGTSESATPESGPGTSESATPESGPGSPAGSPTSTEEGTSESATPESGPGSEPATSGSETPGTSESATPESGPGTSTEPSEGSAPGTSTEPSEGSAPGTSTEPSEGSAPGTSTEPSEGSAPGTSTEPSEGSAPGTSTEPSEGSAPGSPAGSPTSTEEGTSTEPSEGSAPGTSESATPESGPGSEPATSGSETPGTSESATPESGPGSEPATSGSETPGTSESATPESGPGTSTEPSEGSAPGTSESATPESGPGSPAGSPTSTEEGSPAGSPTSTEEGSPAGSPTSTEEGTSESATPESGPGTSTEPSEGSAPGTSESATPESGPGSEPATSGSETPGTSESATPESGPGSEPATSGSETPGTSESATPESGPGTSTEPSEGSAPGSPAGSPTSTEEGTSESATPESGPGSEPATSGSETPGTSESATPESGPGSPAGSPTSTEEGSPAGSPTSTEEGTSTEPSEGSAPGTSESATPESGPGTSESATPESGPGTSESATPESGPGSEPATSGSETPGSEPATSGSETPGSPAGSPTSTEEGTSTEPSEGSAPGTSTEPSEGSAPGSEPATSGSETPGTSESAT

SEQ ID NO: 153 - protein, 72 aa, synthetic construct
  REGION 1..72: note = Description of Artificial Sequence: Synthetic polypeptide
GPGSSPSASTGTGPGTPGSGTASSSPGSSTPSGATGSPGSSPSASTGTGPGASPGTSSTGSPGTPGSGTASS

SEQ ID NO: 154 - protein, 72 aa, synthetic construct
  REGION 1..72: note = Description of Artificial Sequence: Synthetic polypeptide
GSSTPSGATGSPGSSTPSGATGSPGSSPSASTGTGPGSSPSASTGTGPGASPGTSSTGSPGTPGSGTASSSP

SEQ ID NO: 155 - protein, 72 aa, synthetic construct
  REGION 1..72: note = Description of Artificial Sequence: Synthetic polypeptide
SPSASTGTGPGASPGTSSTGSPGSSPSASTGTGPGTPGSGTASSSPGSSTPSGATGSPGSSTPSGATGSPGA

SEQ ID NO: 156 - protein, 108 aa, synthetic construct
  REGION 1..108: note = Description of Artificial Sequence: Synthetic polypeptide
SASTGTGPGSSPSASTGTGPGTPGSGTASSSPGSSTPSGATGSPGSSPSASTGTGPGASPGTSSTGSPGTPGSGTASSSPGSSTPSGATGSPGTPGSGTASSSPGASP

SEQ ID NO: 157 - protein, 108 aa, synthetic construct
  REGION 1..108: note = Description of Artificial Sequence: Synthetic polypeptide
PGTPGSGTASSSPGSSTPSGATGSPGTPGSGTASSSPGSSTPSGATGSPGSSTPSGATGSPGSSPSASTGTGPGSSPSASTGTGPGASPGTSSTGSPGTPGSGTASSS

SEQ ID NO: 158 - protein, 144 aa, synthetic construct; identical to SEQ ID NO: 78
  REGION 1..144: note = Description of Artificial Sequence: Synthetic polypeptide

SEQ ID NO: 159 - protein, 144 aa, synthetic construct
  REGION 1..144: note = Description of Artificial Sequence: Synthetic polypeptide
PSGATGSPGTPGSGTASSSPGSSTPSGATGSPGSSTPSGATGSPGSSPSASTGTGPGSSPSASTGTGPGASPGTSSTGSPGTPGSGTASSSPGSSTPSGATGSPGSSPSASTGTGPGSSPSASTGTGPGASPGTSSTGSPGASP

SEQ ID NO: 160 - protein, 180 aa, synthetic construct
  REGION 1..180: note = Description of Artificial Sequence: Synthetic polypeptide
TSSTGSPGSSPSASTGTGPGSSPSASTGTGPGTPGSGTASSSPGSSTPSGATGSPGSSPSASTGTGPGASPGTSSTGSPGTPGSGTASSSPGSSTPSGATGSPGTPGSGTASSSPGASPGTSSTGSPGASPGTSSTGSPGTPGSGTASSSPGSSTPSGATGSPGASPGTSSTGSPGTPGS

SEQ ID NO: 161 - protein, 216 aa, synthetic construct
  REGION 1..216: note = Description of Artificial Sequence: Synthetic polypeptide
TGTGPGSSPSASTGTGPGTPGSGTASSSPGSSTPSGATGSPGSSPSASTGTGPGASPGTSSTGSPGTPGSGTASSSPGSSTPSGATGSPGTPGSGTASSSPGASPGTSSTGSPGASPGTSSTGSPGTPGSGTASSSPGSSTPSGATGSPGASPGTSSTGSPGTPGSGTASSSPGSSTPSGATGSPGSSPSASTGTGPGSSPSASTGTGPGSSTPSG

SEQ ID NO: 162 - protein, 252 aa, synthetic construct
  REGION 1..252: note = Description of Artificial Sequence: Synthetic polypeptide
TSSTGSPGSSPSASTGTGPGSSPSASTGTGPGTPGSGTASSSPGSSTPSGATGSPGSSPSASTGTGPGASPGTSSTGSPGTPGSGTASSSPGSSTPSGATGSPGTPGSGTASSSPGASPGTSSTGSPGASPGTSSTGSPGTPGSGTASSSPGSSTPSGATGSPGASPGTSSTGSPGTPGSGTASSSPGSSTPSGATGSPGSSPSASTGTGPGSSPSASTGTGPGSSTPSGATGSPGSSTPSGATGSPGASPG

SEQ ID NO: 163 - protein, 288 aa, synthetic construct
  REGION 1..288: note = Description of Artificial Sequence: Synthetic polypeptide
TSSTGSPGSSPSASTGTGPGSSPSASTGTGPGTPGSGTASSSPGSSTPSGATGSPGSSPSASTGTGPGASPGTSSTGSPGTPGSGTASSSPGSSTPSGATGSPGTPGSGTASSSPGASPGTSSTGSPGASPGTSSTGSPGTPGSGTASSSPGSSTPSGATGSPGASPGTSSTGSPGTPGSGTASSSPGSSTPSGATGSPGSSPSASTGTGPGSSPSASTGTGPGSSTPSGATGSPGSSTPSGATGSPGASPGTSSTGSPGASPGTSSTGSPGASPGTSSTGSPGTPGS

SEQ ID NO: 164 - protein, 324 aa, synthetic construct
  REGION 1..324: note = Description of Artificial Sequence: Synthetic polypeptide
TSSTGSPGTPGSGTASSSPGASPGTSSTGSPGASPGTSSTGSPGASPGTSSTGSPGASPGTSSTGSPGTPGSGTASSSPGSSTPSGATGSPGTPGSGTASSSPGSSTPSGATGSPGTPGSGTASSSPGSSTPSGATGSPGSSTPSGATGSPGSSPSASTGTGPGSSPSASTGTGPGASPGTSSTGSPGTPGSGTASSSPGSSTPSGATGSPGSSPSASTGTGPGSSPSASTGTGPGASPGTSSTGSPGASPGTSSTGSPGSSTPSGATGSPGSSPSASTGTGPGASPGTSSTGSPGSSPSASTGTGPGTPGSGTASSSPGSSTP

SEQ ID NO: 165 - protein, 360 aa, synthetic construct
  REGION 1..360: note = Description of Artificial Sequence: Synthetic polypeptide
TSSTGSPGASPGTSSTGSPGTPGSGTASSSPGASPGTSSTGSPGASPGTSSTGSPGASPGTSSTGSPGASPGTSSTGSPGTPGSGTASSSPGSSTPSGATGSPGTPGSGTASSSPGSSTPSGATGSPGTPGSGTASSSPGSSTPSGATGSPGSSTPSGATGSPGSSPSASTGTGPGSSPSASTGTGPGASPGTSSTGSPGTPGSGTASSSPGSSTPSGATGSPGSSPSASTGTGPGSSPSASTGTGPGASPGTSSTGSPGASPGTSSTGSPGSSTPSGATGSPGSSPSASTGTGPGASPGTSSTGSPGSSPSASTGTGPGTPGSGTASSSPGSSTPSGATGSPGSSTPSGATGSPGASPG

SEQ ID NO: 166 - protein, 396 aa, synthetic construct
  REGION 1..396: note = Description of Artificial Sequence: Synthetic polypeptide
GATGSPGSSTPSGATGSPGSSPSASTGTGPGASPGTSSTGSPGASPGTSSTGSPGTPGSGTASSSPGASPGTSSTGSPGASPGTSSTGSPGASPGTSSTGSPGASPGTSSTGSPGTPGSGTASSSPGSSTPSGATGSPGTPGSGTASSSPGSSTPSGATGSPGTPGSGTASSSPGSSTPSGATGSPGSSTPSGATGSPGSSPSASTGTGPGSSPSASTGTGPGASPGTSSTGSPGTPGSGTASSSPGSSTPSGATGSPGSSPSASTGTGPGSSPSASTGTGPGASPGTSSTGSPGASPGTSSTGSPGSSTPSGATGSPGSSPSASTGTGPGASPGTSSTGSPGSSPSASTGTGPGTPGSGTASSSPGSSTPSGATGSPGSSTPSGATGSPGASPGT

SEQ ID NO: 167 - protein, 432 aa, synthetic construct
  REGION 1..432: note = Description of Artificial Sequence: Synthetic polypeptide
GATGSPGSSTPSGATGSPGASPGTSSTGSPGTPGSGTASSSPGSSTPSGATGSPGSSTPSGATGSPGSSTPSGATGSPGSSPSASTGTGPGASPGTSSTGSPGASPGTSSTGSPGTPGSGTASSSPGASPGTSSTGSPGASPGTSSTGSPGASPGTSSTGSPGASPGTSSTGSPGTPGSGTASSSPGSSTPSGATGSPGTPGSGTASSSPGSSTPSGATGSPGTPGSGTASSSPGSSTPSGATGSPGSSTPSGATGSPGSSPSASTGTGPGSSPSASTGTGPGASPGTSSTGSPGTPGSGTASSSPGSSTPSGATGSPGSSPSASTGTGPGSSPSASTGTGPGASPGTSSTGSPGASPGTSSTGSPGSSTPSGATGSPGSSPSASTGTGPGASPGTSSTGSPGSSPSASTGTGPGTPGSGTASSSPGSSTPS

SEQ ID NO: 168 - protein, 468 aa, synthetic construct
  REGION 1..468: note = Description of Artificial Sequence: Synthetic polypeptide
TSSTGSPGSSPSASTGTGPGTPGSGTASSSPGASPGTSSTGSPGASPGTSSTGSPGASPGTSSTGSPGSSTPSGATGSPGSSTPSGATGSPGASPGTSSTGSPGTPGSGTASSSPGSSTPSGATGSPGSSTPSGATGSPGSSTPSGATGSPGSSPSASTGTGPGASPGTSSTGSPGASPGTSSTGSPGTPGSGTASSSPGASPGTSSTGSPGASPGTSSTGSPGASPGTSSTGSPGASPGTSSTGSPGTPGSGTASSSPGSSTPSGATGSPGTPGSGTASSSPGSSTPSGATGSPGTPGSGTASSSPGSSTPSGATGSPGSSTPSGATGSPGSSPSASTGTGPGSSPSASTGTGPGASPGTSSTGSPGTPGSGTASSSPGSSTPSGATGSPGSSPSASTGTGPGSSPSASTGTGPGASPGTSSTGSPGASPGTSSTGSPGSSTPSGATGSPGSSPSASTGTGPGASPG

SEQ ID NO: 169 - protein, 504 aa, synthetic construct
  REGION 1..504: note = Description of Artificial Sequence: Synthetic polypeptide
TSSTGSPGSSPSASTGTGPGTPGSGTASSSPGASPGTSSTGSPGASPGTSSTGSPGASPGTSSTGSPGSSTPSGATGSPGSSTPSGATGSPGASPGTSSTGSPGTPGSGTASSSPGSSTPSGATGSPGSSTPSGATGSPGSSTPSGATGSPGSSPSASTGTGPGASPGTSSTGSPGASPGTSSTGSPGTPGSGTASSSPGASPGTSSTGSPGASPGTSSTGSPGASPGTSSTGSPGASPGTSSTGSPGTPGSGTASSSPGSSTPSGATGSPGTPGSGTASSSPGSSTPSGATGSPGTPGSGTASSSPGSSTPSGATGSPGSSTPSGATGSPGSSPSASTGTGPGSSPSASTGTGPGASPGTSSTGSPGTPGSGTASSSPGSSTPSGATGSPGSSPSASTGTGPGSSPSASTGTGPGASPGTSSTGSPGASPGTSSTGSPGSSTPSGATGSPGSSPSASTGTGPGASPGTSSTGSPGSSPSASTGTGPGTPGSGTASSSPGSSTP

SEQ ID NO: 170 - protein, 540 aa, synthetic construct
  REGION 1..540: note = Description of Artificial Sequence: Synthetic polypeptide
TSSTGSPGASPGTSSTGSPGSSPSASTGTGPGTPGSGTASSSPGASPGTSSTGSPGASPGTSSTGSPGASPGTSSTGSPGSSTPSGATGSPGSSTPSGATGSPGASPGTSSTGSPGTPGSGTASSSPGSSTPSGATGSPGSSTPSGATGSPGSSTPSGATGSPGSSPSASTGTGPGASPGTSSTGSPGASPGTSSTGSPGTPGSGTASSSPGASPGTSSTGSPGASPGTSSTGSPGASPGTSSTGSPGASPGTSSTGSPGTPGSGTASSSPGSSTPSGATGSPGTPGSGTASSSPGSSTPSGATGSPGTPGSGTASSSPGSSTPSGATGSPGSSTPSGATGSPGSSPSASTGTGPGSSPSASTGTGPGASPGTSSTGSPGTPGSGTASSSPGSSTPSGATGSPGSSPSASTGTGPGSSPSASTGTGPGASPGTSSTGSPGASPGTSSTGSPGSSTPSGATGSPGSSPSASTGTGPGASPGTSSTGSPGSSPSASTGTGPGTPGSGTASSSPGSSTPSGATGSPGSSTPSGATGSPGASPG

SEQ ID NO: 171 - protein, 576 aa, synthetic construct
  REGION 1..576: note = Description of Artificial Sequence: Synthetic polypeptide
TSSTGSPGTPGSGTASSSPGASPGTSSTGSPGASPGTSSTGSPGASPGTSSTGSPGSSPSASTGTGPGTPGSGTASSSPGASPGTSSTGSPGASPGTSSTGSPGASPGTSSTGSPGSSTPSGATGSPGSSTPSGATGSPGASPGTSSTGSPGTPGSGTASSSPGSSTPSGATGSPGSSTPSGATGSPGSSTPSGATGSPGSSPSASTGTGPGASPGTSSTGSPGASPGTSSTGSPGTPGSGTASSSPGASPGTSSTGSPGASPGTSSTGSPGASPGTSSTGSPGASPGTSSTGSPGTPGSGTASSSPGSSTPSGATGSPGTPGSGTASSSPGSSTPSGATGSPGTPGSGTASSSPGSSTPSGATGSPGSSTPSGATGSPGSSPSASTGTGPGSSPSASTGTGPGASPGTSSTGSPGTPGSGTASSSPGSSTPSGATGSPGSSPSASTGTGPGSSPSASTGTGPGASPGTSSTGSPGASPGTSSTGSPGSSTPSGATGSPGSSPSASTGTGPGASPGTSSTGSPGSSPSASTGTGPGTPGSGTASSSPGSSTPSGATGSPGSSTPSGATGSPGASPG

SEQ ID NO: 172 - protein, 612 aa, synthetic construct
  REGION 1..612: note = Description of Artificial Sequence: Synthetic polypeptide
STGSPGTPGSGTASSSPGSSTPSGATGSPGASPGTSSTGSPGTPGSGTASSSPGSSTPSGATGSPGSSPSASTGTGPGSSPSASTGTGPGSSTPSGATGSPGSSTPSGATGSPGASPGTSSTGSPGASPGTSSTGSPGASPGTSSTGSPGTPGSGTASSSPGASPGTSSTGSPGASPGTSSTGSPGASPGTSSTGSPGSSPSASTGTGPGTPGSGTASSSPGASPGTSSTGSPGASPGTSSTGSPGASPGTSSTGSPGSSTPSGATGSPGSSTPSGATGSPGASPGTSSTGSPGTPGSGTASSSPGSSTPSGATGSPGSSTPSGATGSPGSSTPSGATGSPGSSPSASTGTGPGASPGTSSTGSPGASPGTSSTGSPGTPGSGTASSSPGASPGTSSTGSPGASPGTSSTGSPGASPGTSSTGSPGASPGTSSTGSPGTPGSGTASSSPGSSTPSGATGSPGTPGSGTASSSPGSSTPSGATGSPGTPGSGTASSSPGSSTPSGATGSPGSSTPSGATGSPGSSPSASTGTGPGSSPSASTGTGPGASPGTSSTGSPGTPGSGTASSSPGSSTPSGATGSPGSSPSASTGTGPGSSPSASTGTGPGASPGTS

SEQ ID NO: 173 - protein, 648 aa, synthetic construct
  REGION 1..648: note = Description of Artificial Sequence: Synthetic polypeptide
GTASSSPGSSTPSGATGSPGSSPSASTGTGPGSSPSASTGTGPGSSTPSGATGSPGSSTPSGATGSPGASPGTSSTGSPGASPGTSSTGSPGASPGTSSTGSPGTPGSGTASSSPGASPGTSSTGSPGASPGTSSTGSPGASPGTSSTGSPGSSPSASTGTGPGTPGSGTASSSPGASPGTSSTGSPGASPGTSSTGSPGASPGTSSTGSPGSSTPSGATGSPGSSTPSGATGSPGASPGTSSTGSPGTPGSGTASSSPGSSTPSGATGSPGSSTPSGATGSPGSSTPSGATGSPGSSPSASTGTGPGASPGTSSTGSPGASPGTSSTGSPGTPGSGTASSSPGASPGTSSTGSPGASPGTSSTGSPGASPGTSSTGSPGASPGTSSTGSPGTPGSGTASSSPGSSTPSGATGSPGTPGSGTASSSPGSSTPSGATGSPGTPGSGTASSSPGSSTPSGATGSPGSSTPSGATGSPGSSPSASTGTGPGSSPSASTGTGPGASPGTSSTGSPGTPGSGTASSSPGSSTPSGATGSPGSSPSASTGTGPGSSPSASTGTGPGASPGTSSTGSPGASPGTSSTGSPGSSTPSGATGSPGSSPSASTGTGPGASPGTSSTGSPGSSPSASTGTGPGTPGSGTASSSPGSSTP

SEQ ID NO: 174 - protein, 684 aa, synthetic construct
  REGION 1..684: note = Description of Artificial Sequence: Synthetic polypeptide
TSSTGSPGTPGSGTASSSPGSSTPSGATGSPGSSPSASTGTGPGSSPSASTGTGPGSSTPSGATGSPGSSTPSGATGSPGASPGTSSTGSPGASPGTSSTGSPGASPGTSSTGSPGTPGSGTASSSPGASPGTSSTGSPGASPGTSSTGSPGASPGTSSTGSPGSSPSASTGTGPGTPGSGTASSSPGASPGTSSTGSPGASPGTSSTGSPGASPGTSSTGSPGSSTPSGATGSPGSSTPSGATGSPGASPGTSSTGSPGTPGSGTASSSPGSSTPSGATGSPGSSTPSGATGSPGSSTPSGATGSPGSSPSASTGTGPGASPGTSSTGSPGASPGTSSTGSPGTPGSGTASSSPGASPGTSSTGSPGASPGTSSTGSPGASPGTSSTGSPGASPGTSSTGSPGTPGSGTASSSPGSSTPSGATGSPGTPGSGTASSSPGSSTPSGATGSPGTPGSGTASSSPGSSTPSGATGSPGSSTPSGATGSPGSSPSASTGTGPGSSPSASTGTGPGASPGTSSTGSPGTPGSGTASSSPGSSTPSGATGSPGSSPSASTGTGPGSSPSASTGTGPGASPGTSSTGSPGASPGTSSTGSPGSSTPSGATGSPGSSPSASTGTGPGASPGTSSTGSPGSSPSASTGTGPGTPGSGTASSSPGSSTPSGATGSPGSSTPSGATGSPGASPG

SEQ ID NO: 175 - protein, 720 aa, synthetic construct
  REGION 1..720: note = Description of Artificial Sequence: Synthetic polypeptide
TSSTGSPGTPGSGTASSSPGSSTPSGATGSPGASPGTSSTGSPGTPGSGTASSSPGSSTPSGATGSPGSSPSASTGTGPGSSPSASTGTGPGSSTPSGATGSPGSSTPSGATGSPGASPGTSSTGSPGASPGTSSTGSPGASPGTSSTGSPGTPGSGTASSSPGASPGTSSTGSPGASPGTSSTGSPGASPGTSSTGSPGSSPSASTGTGPGTPGSGTASSSPGASPGTSSTGSPGASPGTSSTGSPGASPGTSSTGSPGSSTPSGATGSPGSSTPSGATGSPGASPGTSSTGSPGTPGSGTASSSPGSSTPSGATGSPGSSTPSGATGSPGSSTPSGATGSPGSSPSASTGTGPGASPGTSSTGSPGASPGTSSTGSPGTPGSGTASSSPGASPGTSSTGSPGASPGTSSTGSPGASPGTSSTGSPGASPGTSSTGSPGTPGSGTASSSPGSSTPSGATGSPGTPGSGTASSSPGSSTPSGATGSPGTPGSGTASSSPGSSTPSGATGSPGSSTPSGATGSPGSSPSASTGTGPGSSPSASTGTGPGASPGTSSTGSPGTPGSGTASSSPGSSTPSGATGSPGSSPSASTGTGPGSSPSASTGTGPGASPGTSSTGSPGASPGTSSTGSPGSSTPSGATGSPGSSPSASTGTGPGASPGTSSTGSPGSSPSASTGTGPGTPGSGTASSSPGSSTPSGATGSPGSSTPSGATGSPGASPG

SEQ ID NO: 176 - protein, 756 aa, synthetic construct
  REGION 1..756: note = Description of Artificial Sequence: Synthetic polypeptide
TSSTGSPGSSPSASTGTGPGSSPSASTGTGPGTPGSGTASSSPGSSTPSGATGSPGSSPSASTGTGPGASPGTSSTGSPGTPGSGTASSSPGSSTPSGATGSPGTPGSGTASSSPGASPGTSSTGSPGASPGTSSTGSPGTPGSGTASSSPGSSTPSGATGSPGASPGTSSTGSPGTPGSGTASSSPGSSTPSGATGSPGSSPSASTGTGPGSSPSASTGTGPGSSTPSGATGSPGSSTPSGATGSPGASPGTSSTGSPGASPGTSSTGSPGASPGTSSTGSPGTPGSGTASSSPGASPGTSSTGSPGASPGTSSTGSPGASPGTSSTGSPGSSPSASTGTGPGTPGSGTASSSPGASPGTSSTGSPGASPGTSSTGSPGASPGTSSTGSPGSSTPSGATGSPGSSTPSGATGSPGASPGTSSTGSPGTPGSGTASSSPGSSTPSGATGSPGSSTPSGATGSPGSSTPSGATGSPGSSPSASTGTGPGASPGTSSTGSPGASPGTSSTGSPGTPGSGTASSSPGASPGTSSTGSPGASPGTSSTGSPGASPGTSSTGSPGASPGTSSTGSPGTPGSGTASSSPGSSTPSGATGSPGTPGSGTASSSPGSSTPSGATGSPGTPGSGTASSSPGSSTPSGATGSPGSSTPSGATGSPGSSPSASTGTGPGSSPSASTGTGPGASPGTSSTGSPGTPGSGTASSSPGSSTPSGATGSPGSSPSASTGTGPGSSPSASTGTGPGASPGTSSTGSPGASPG

SEQ ID NO: 177 - protein, 792 aa, synthetic construct
  REGION 1..792: note = Description of Artificial Sequence: Synthetic polypeptide
TSSTGSPGSSPSASTGTGPGSSPSASTGTGPGTPGSGTASSSPGSSTPSGATGSPGSSPSASTGTGPGASPGTSSTGSPGTPGSGTASSSPGSSTPSGATGSPGTPGSGTASSSPGASPGTSSTGSPGASPGTSSTGSPGTPGSGTASSSPGSSTPSGATGSPGASPGTSSTGSPGTPGSGTASSSPGSSTPSGATGSPGSSPSASTGTGPGSSPSASTGTGPGSSTPSGATGSPGSSTPSGATGSPGASPGTSSTGSPGASPGTSSTGSPGASPGTSSTGSPGTPGSGTASSSPGASPGTSSTGSPGASPGTSSTGSPGASPGTSSTGSPGSSPSASTGTGPGTPGSGTASSSPGASPGTSSTGSPGASPGTSSTGSPGASPGTSSTGSPGSSTPSGATGSPGSSTPSGATGSPGASPGTSSTGSPGTPGSGTASSSPGSSTPSGATGSPGSSTPSGATGSPGSSTPSGATGSPGSSPSASTGTGPGASPGTSSTGSPGASPGTSSTGSPGTPGSGTASSSPGASPGTSSTGSPGASPGTSSTGSPGASPGTSSTGSPGASPGTSSTGSPGTPGSGTASSSPGSSTPSGATGSPGTPGSGTASSSPGSSTPSGATGSPGTPGSGTASSSPGSSTPSGATGSPGSSTPSGATGSPGSSPSASTGTGPGSSPSASTGTGPGASPGTSSTGSPGTPGSGTASSSPGSSTPSGATGSPGSSPSASTGTGPGSSPSASTGTGPGASPGTSSTGSPGASPGTSSTGSPGSSTPSGATGSPGSSPSASTGTGPGASPG

SEQ ID NO: 178 - protein, 828 aa, synthetic construct
  REGION 1..828: note = Description of Artificial Sequence: Synthetic polypeptide
TSSTGSPGSSPSASTGTGPGSSPSASTGTGPGTPGSGTASSSPGSSTPSGATGSPGSSPSASTGTGPGASPGTSSTGSPGTPGSGTASSSPGSSTPSGATGSPGTPGSGTASSSPGASPGTSSTGSPGASPGTSSTGSPGTPGSGTASSSPGSSTPSGATGSPGASPGTSSTGSPGTPGSGTASSSPGSSTPSGATGSPGSSPSASTGTGPGSSPSASTGTGPGSSTPSGATGSPGSSTPSGATGSPGASPGTSSTGSPGASPGTSSTGSPGASPGTSSTGSPGTPGSGTASSSPGASPGTSSTGSPGASPGTSSTGSPGASPGTSSTGSPGSSPSASTGTGPGTPGSGTASSSPGASPGTSSTGSPGASPGTSSTGSPGASPGTSSTGSPGSSTPSGATGSPGSSTPSGATGSPGASPGTSSTGSPGTPGSGTASSSPGSSTPSGATGSPGSSTPSGATGSPGSSTPSGATGSPGSSPSASTGTGPGASPGTSSTGSPGASPGTSSTGSPGTPGSGTASSSPGASPGTSSTGSPGASPGTSSTGSPGASPGTSSTGSPGASPGTSSTGSPGTPGSGTASSSPGSSTPSGATGSPGTPGSGTASSSPGSSTPSGATGSPGTPGSGTASSSPGSSTPSGATGSPGSSTPSGATGSPGSSPSASTGTGPGSSPSASTGTGPGASPGTSSTGSPGTPGSGTASSSPGSSTPSGATGSPGSSPSASTGTGPGSSPSASTGTGPGASPGTSSTGSPGASPGTSSTGSPGSSTPSGATGSPGSSPSASTGTGPGASPGTSSTGSPGSSPSASTGTGPGTPGSGTASSSPGSSTP

SEQ ID NO: 179 - protein, 869 aa, synthetic construct
  REGION 1..869: note = Description of Artificial Sequence: Synthetic polypeptide
GSPGSPAGSPTSTEEGTSESATPESGPGTSTEPSEGSAPGSPAGSPTSTEEGTSTEPSEGSAPGTSTEPSEGSAPGTSESATPESGPGSEPATSGSETPGSEPATSGSETPGSPAGSPTSTEEGTSESATPESGPGTSTEPSEGSAPGTSTEPSEGSAPGSPAGSPTSTEEGTSTEPSEGSAPGTSTEPSEGSAPGTSESATPESGPGTSTEPSEGSAPGTSESATPESGPGSEPATSGSETPGTSTEPSEGSAPGTSTEPSEGSAPGTSESATPESGPGTSESATPESGPGSPAGSPTSTEEGTSESATPESGPGSEPATSGSETPGTSESATPESGPGTSTEPSEGSAPGTSTEPSEGSAPGTSTEPSEGSAPGTSTEPSEGSAPGTSTEPSEGSAPGTSTEPSEGSAPGSPAGSPTSTEEGTSTEPSEGSAPGTSESATPESGPGSEPATSGSETPGTSESATPESGPGSEPATSGSETPGTSESATPESGPGTSTEPSEGSAPGTSESATPESGPGSPAGSPTSTEEGSPAGSPTSTEEGSPAGSPTSTEEGTSESATPESGPGTSTEPSEGSAPGTSESATPESGPGSEPATSGSETPGTSESATPESGPGSEPATSGSETPGTSESATPESGPGTSTEPSEGSAPGSPAGSPTSTEEGTSESATPESGPGSEPATSGSETPGTSESATPESGPGSPAGSPTSTEEGSPAGSPTSTEEGTSTEPSEGSAPGTSESATPESGPGTSESATPESGPGTSESATPESGPGSEPATSGSETPGSEPATSGSETPGSPAGSPTSTEEGTSTEPSEGSAPGTSTEPSEGSAPGSEPATSGSETPGTSESATPESGPGTSTEPSEGSAPGR

SEQ ID NO: 180 - protein, 144 aa, synthetic construct
  REGION 1..144: note = Description of Artificial Sequence: Synthetic polypeptide
SAGSPGSPAGSPTSTEEGTSESATPESGPGTSTEPSEGSAPGSPAGSPTSTEEGTSTEPSEGSAPGTSTEPSEGSAPGTSESATPESGPGSEPATSGSETPGSEPATSGSETPGSPAGSPTSTEEGTSESATPESGPGTESASR

SEQ ID NO: 181 - protein, 288 aa, synthetic construct
  REGION 1..288: note = Description of Artificial Sequence: Synthetic polypeptide
SAGSPTGPGSEPATSGSETPGTSESATPESGPGSEPATSGSETPGTSESATPESGPGTSTEPSEGSAPGSPAGSPTSTEEGTSESATPESGPGSEPATSGSETPGTSESATPESGPGSPAGSPTSTEEGSPAGSPTSTEEGTSTEPSEGSAPGTSESATPESGPGTSESATPESGPGTSESATPESGPGSEPATSGSETPGSEPATSGSETPGSPAGSPTSTEEGTSTEPSEGSAPGTSTEPSEGSAPGSEPATSGSETPGTSESATPESGPGTSTEPSEGSAPSASR

SEQ ID NO: 182 - protein, 432 aa, synthetic construct
  REGION 1..432: note = Description of Artificial Sequence: Synthetic polypeptide
SAGSPGSPAGSPTSTEEGTSESATPESGPGTSTEPSEGSAPGSPAGSPTSTEEGTSTEPSEGSAPGTSTEPSEGSAPGTSESATPESGPGSEPATSGSETPGSEPATSGSETPGSPAGSPTSTEEGTSESATPESGPGTSTEPSEGSAPGTSTEPSEGSAPGSPAGSPTSTEEGTSTEPSEGSAPGTSTEPSEGSAPGTSESATPESGPGTSTEPSEGSAPGTSESATPESGPGSEPATSGSETPGTSTEPSEGSAPGTSTEPSEGSAPGTSESATPESGPGTSESATPESGPGSPAGSPTSTEEGTSESATPESGPGSEPATSGSETPGTSESATPESGPGTSTEPSEGSAPGTSTEPSEGSAPGTSTEPSEGSAPGTSTEPSEGSAPGTSTEPSEGSAPGTSTEPSEGSAPGSPAGSPTSTEEGTESASR

SEQ ID NO: 183 - protein, 576 aa, synthetic construct
  REGION 1..576: note = Description of Artificial Sequence: Synthetic polypeptide
SAGSPTEEGTSESATPESGPGSEPATSGSETPGTSESATPESGPGTSTEPSEGSAPGTSTEPSEGSAPGTSTEPSEGSAPGTSTEPSEGSAPGTSTEPSEGSAPGTSTEPSEGSAPGSPAGSPTSTEEGTSTEPSEGSAPGTSESATPESGPGSEPATSGSETPGTSESATPESGPGSEPATSGSETPGTSESATPESGPGTSTEPSEGSAPGTSESATPESGPGSPAGSPTSTEEGSPAGSPTSTEEGSPAGSPTSTEEGTSESATPESGPGTSTEPSEGSAPGTSESATPESGPGSEPATSGSETPGTSESATPESGPGSEPATSGSETPGTSESATPESGPGTSTEPSEGSAPGSPAGSPTSTEEGTSESATPESGPGSEPATSGSETPGTSESATPESGPGSPAGSPTSTEEGSPAGSPTSTEEGTSTEPSEGSAPGTSESATPESGPGTSESATPESGPGTSESATPESGPGSEPATSGSETPGSEPATSGSETPGSPAGSPTSTEEGTSTEPSEGSAPGTSTEPSEGSAPGSEPATSGSETPGTSESATPESGPGTSTEPSEGSAPSASR

SEQ ID NO: 184 - protein, 864 aa, synthetic construct
  REGION 1..864: note = Description of Artificial Sequence: Synthetic polypeptide
SAGSPGSPAGSPTSTEEGTSESATPESGPGTSTEPSEGSAPGSPAGSPTSTEEGTSTEPSEGSAPGTSTEPSEGSAPGTSESATPESGPGSEPATSGSETPGSEPATSGSETPGSPAGSPTSTEEGTSESATPESGPGTSTEPSEGSAPGTSTEPSEGSAPGSPAGSPTSTEEGTSTEPSEGSAPGTSTEPSEGSAPGTSESATPESGPGTSTEPSEGSAPGTSESATPESGPGSEPATSGSETPGTSTEPSEGSAPGTSTEPSEGSAPGTSESATPESGPGTSESATPESGPGSPAGSPTSTEEGTSESATPESGPGSEPATSGSETPGTSESATPESGPGTSTEPSEGSAPGTSTEPSEGSAPGTSTEPSEGSAPGTSTEPSEGSAPGTSTEPSEGSAPGTSTEPSEGSAPGSPAGSPTSTEEGTSTEPSEGSAPGTSESATPESGPGSEPATSGSETPGTSESATPESGPGSEPATSGSETPGTSESATPESGPGTSTEPSEGSAPGTSESATPESGPGSPAGSPTSTEEGSPAGSPTSTEEGSPAGSPTSTEEGTSESATPESGPGTSTEPSEGSAPGTSESATPESGPGSEPATSGSETPGTSESATPESGPGSEPATSGSETPGTSESATPESGPGTSTEPSEGSAPGSPAGSPTSTEEGTSESATPESGPGSEPATSGSETPGTSESATPESGPGSPAGSPTSTEEGSPAGSPTSTEEGTSTEPSEGSAPGTSESATPESGPGTSESATPESGPGTSESATPESGPGSEPATSGSETPGSEPATSGSETPGSPAGSPTSTEEGTSTEPSEGSAPGTSTEPSEGSAPGSEPATSGSETPGTSESATPESGPGTESASR

SEQ ID NO: 185 - protein, 864 aa, synthetic construct
  REGION 1..864: note = Description of Artificial Sequence: Synthetic polypeptide
SAGSPGSTSSTAESPGPGSTSSTAESPGPGSTSESPSGTAPGSTSSTAESPGPGSTSSTAESPGPGTSTPESGSASPGSTSESPSGTAPGTSPSGESSTAPGSTSESPSGTAPGSTSESPSGTAPGTSPSGESSTAPGSTSESPSGTAPGSTSESPSGTAPGTSPSGESSTAPGSTSESPSGTAPGSTSESPSGTAPGSTSESPSGTAPGTSTPESGSASPGSTSESPSGTAPGTSTPESGSASPGSTSSTAESPGPGSTSSTAESPGPGTSTPESGSASPGTSTPESGSASPGSTSESPSGTAPGTSTPESGSASPGTSTPESGSASPGSTSESPSGTAPGSTSESPSGTAPGSTSESPSGTAPGSTSSTAESPGPGTSTPESGSASPGTSTPESGSASPGSTSESPSGTAPGSTSESPSGTAPGTSTPESGSASPGSTSESPSGTAPGSTSESPSGTAPGTSTPESGSASPGTSPSGESSTAPGSTSSTAESPGPGTSPSGESSTAPGSTSSTAESPGPGTSTPESGSASPGSTSESPSGTAPGSTSSTAESPGPGTSTPESGSASPGTSTPESGSASPGSTSSTAESPGPGTSPSGESSTAPGTSTPESGSASPGSTSESPSGTAPGSTSESPSGTAPGTSTPESGSASPGTSPSGESSTAPGSTSSTAESPGPGTSPSGESSTAPGSTSSTAESPGPGSTSSTAESPGPGTSPSGESSTAPGSTSESPSGTAPGSTSESPSGTAPGTSTPESGSASPGSTSESPSGTAPGSTSESPSGTAPGTSTPESGSASPGSTSESPSGTAPGSTSESPSGTAPGSTSESPSGTAPGSTSSTAESPGPGTSPSGESSTAPGTSSASR

SEQ ID NO: 186 - protein, 864 aa, synthetic construct
  REGION 1..864: note = Description of Artificial Sequence: Synthetic polypeptide
SAGSPGASPGTSSTGSPGSSPSASTGTGPGSSPSASTGTGPGTPGSGTASSSPGSSTPSGATGSPGSSPSASTGTGPGASPGTSSTGSPGTPGSGTASSSPGSSTPSGATGSPGTPGSGTASSSPGASPGTSSTGSPGASPGTSSTGSPGTPGSGTASSSPGSSTPSGATGSPGASPGTSSTGSPGTPGSGTASSSPGSSTPSGATGSPGSSPSASTGTGPGSSPSASTGTGPGSSTPSGATGSPGSSTPSGATGSPGASPGTSSTGSPGASPGTSSTGSPGASPGTSSTGSPGTPGSGTASSSPGASPGTSSTGSPGASPGTSSTGSPGASPGTSSTGSPGSSPSASTGTGPGTPGSGTASSSPGASPGTSSTGSPGASPGTSSTGSPGASPGTSSTGSPGSSTPSGATGSPGSSTPSGATGSPGASPGTSSTGSPGTPGSGTASSSPGSSTPSGATGSPGSSTPSGATGSPGSSTPSGATGSPGSSPSASTGTGPGASPGTSSTGSPGASPGTSSTGSPGTPGSGTASSSPGASPGTSSTGSPGASPGTSSTGSPGASPGTSSTGSPGASPGTSSTGSPGTPGSGTASSSPGSSTPSGATGSPGTPGSGTASSSPGSSTPSGATGSPGTPGSGTASSSPGSSTPSGATGSPGSSTPSGATGSPGSSPSASTGTGPGSSPSASTGTGPGASPGTSSTGSPGTPGSGTASSSPGSSTPSGATGSPGSSPSASTGTGPGSSPSASTGTGPGASPGTSSTGSPGASPGTSSTGSPGSSTPSGATGSPGSSPSASTGTGPGASPGTSSTGSPGSSPSASTGTGPGTPGSGTASSSPGSSTPSGATGSPGSSTPSGATGSPGASSASR

SEQ ID NO: 187 - protein, 11 aa, synthetic construct
  REGION 1..11: note = Description of Artificial Sequence: Synthetic peptide
GGSPAGSCTSP

SEQ ID NO: 188 - protein, 11 aa, synthetic construct
  REGION 1..11: note = Description of Artificial Sequence: Synthetic peptide
GASASCAPSTG

SEQ ID NO: 189 - protein, 13 aa, synthetic construct
  REGION 1..13: note = Description of Artificial Sequence: Synthetic peptide
TAEAAGCGTAEAA

SEQ ID NO: 190 - protein, 11 aa, synthetic construct
  REGION 1..11: note = Description of Artificial Sequence: Synthetic peptide
GPEPTCPAPSG

SEQ ID NO: 191 - protein, 11 aa, synthetic construct
  REGION 1..11: note = Description of Artificial Sequence: Synthetic peptide
GGSPAGSKTSP

SEQ ID NO: 192 - protein, 11 aa, synthetic construct
  REGION 1..11: note = Description of Artificial Sequence: Synthetic peptide
GASASKAPSTG

SEQ ID NO: 193 - protein, 879 aa, synthetic construct
  REGION 1..879: note = Description of Artificial Sequence: Synthetic polypeptide
AGSPAGSPTSTEEGTSESATPESGPGTSTEPSEGSAPGSPAGSPTSTEEGTSTEPSEGSAPGTSTEPSEGSAPGTSESATPESGPGSEPATSGSETPGSEPATSGSETPGSPAGSPTSTEEGTSESATPESGPGTSTEPSEGSAPGTSTEPSEGSAPGSPAGSPTSTEEGTSTEPSEGSAPGTSTEPSEGSAPGTSESATPESGPGTSTEPSEGSAPGTSESATPESGPGSEPATSGSETPGTSTEPSEGSAPGTSTEPSEGSAPGTSESATPESGPGTSESATPESGPGSPAGSPTSTEEGTSESATPESGPGSEPATSGSETPGTSESATPESGPGTSTEPSEGSAPGTSTEPSEGSAPGTSTEPSEGSAPGTSTEPSEGSAPGTSTEPSEGSAPGTSTEPSEGSAPGSPAGSPTSTEEGTSTEPSEGSAPTAEAAGCGTAEAAGTSESATPESGPGSEPATSGSETPGTSESATPESGPGSEPATSGSETPGTSESATPESGPGTSTEPSEGSAPGTSESATPESGPGSPAGSPTSTEEGSPAGSPTSTEEGSPAGSPTSTEEGTSESATPESGPGTSTEPSEGSAPGTSESATPESGPGSEPATSGSETPGTSESATPESGPGSEPATSGSETPGTSESATPESGPGTSTEPSEGSAPGSPAGSPTSTEEGTSESATPESGPGSEPATSGSETPGTSESATPESGPGSPAGSPTSTEEGSPAGSPTSTEEGTSTEPSEGSAPGTSESATPESGPGTSESATPESGPGTSESATPESGPGSEPATSGSETPGSEPATSGSETPGSPAGSPTSTEEGTSTEPSEGSAPGTSTEPSEGSAPGSEPATSGSETPGTSESATPESGPGTSTEPSEGSAPR

SEQ ID NO: 194 - protein, 892 aa, synthetic construct
  REGION 1..892: note = Description of Artificial Sequence: Synthetic polypeptide
ATAEAAGCGTAEAAGSPAGSPTSTEEGTSESATPESGPGTSTEPSEGSAPGSPAGSPTSTEEGTSTEPSEGSAPGTSTEPSEGSAPGTSESATPESGPGSEPATSGSETPGSEPATSGSETPGSPAGSPTSTEEGTSESATPESGPGTSTEPSEGSAPGTSTEPSEGSAPGSPAGSPTSTEEGTSTEPSEGSAPGTSTEPSEGSAPGTSESATPESGPGTSTEPSEGSAPGTSESATPESGPGSEPATSGSETPGTSTEPSEGSAPGTSTEPSEGSAPGTSESATPESGPGTSESATPESGPGSPAGSPTSTEEGTSESATPESGPGSEPATSGSETPGTSESATPESGPGTSTEPSEGSAPGTSTEPSEGSAPGTSTEPSEGSAPGTSTEPSEGSAPGTSTEPSEGSAPGTSTEPSEGSAPGSPAGSPTSTEEGTSTEPSEGSAPGTSESATPESGPGSEPATSGSETPGTSESATPESGPGSEPATSGSETPGTSESATPESGPGTSTEPSEGSAPGTSESATPESGPGSPAGSPTSTEEGSPAGSPTSTEEGSPAGSPTSTEEGTSESATPESGPGTSTEPSEGSAPGTSESATPESGPGSEPATSGSETPGTSESATPESGPGSEPATSGSETPGTSESATPESGPGTSTEPSEGSAPGSPAGSPTSTEEGTSESATPESGPGSEPATSGSETPGTSESATPESGPGSPAGSPTSTEEGSPAGSPTSTEEGTSTEPSEGSAPGTSESATPESGPGTSESATPESGPGTSESATPESGPGSEPATSGSETPGSEPATSGSETPGSPAGSPTSTEEGTSTEPSEGSAPGTSTEPSEGSAPGSEPATSGSETPGTSESATPESGPGTSTEPSEGSAPTAEAAGCGTAEAAR

SEQ ID NO: 195 - protein, 905 aa, synthetic construct
  REGION 1..905: note = Description of Artificial Sequence: Synthetic polypeptide
ATAEAAGCGTAEAAGSPAGSPTSTEEGTSESATPESGPGTSTEPSEGSAPGSPAGSPTSTEEGTSTEPSEGSAPGTSTEPSEGSAPGTSESATPESGPGSEPATSGSETPGSEPATSGSETPGSPAGSPTSTEEGTSESATPESGPGTSTEPSEGSAPGTSTEPSEGSAPGSPAGSPTSTEEGTSTEPSEGSAPGTSTEPSEGSAPGTSESATPESGPGTSTEPSEGSAPGTSESATPESGPGSEPATSGSETPGTSTEPSEGSAPGTSTEPSEGSAPGTSESATPESGPGTSESATPESGPGSPAGSPTSTEEGTSESATPESGPGSEPATSGSETPGTSESATPESGPGTSTEPSEGSAPGTSTEPSEGSAPGTSTEPSEGSAPGTSTEPSEGSAPGTSTEPSEGSAPGTSTEPSEGSAPGSPAGSPTSTEEGTSTEPSEGSAPTAEAAGCGTAEAAGTSESATPESGPGSEPATSGSETPGTSESATPESGPGSEPATSGSETPGTSESATPESGPGTSTEPSEGSAPGTSESATPESGPGSPAGSPTSTEEGSPAGSPTSTEEGSPAGSPTSTEEGTSESATPESGPGTSTEPSEGSAPGTSESATPESGPGSEPATSGSETPGTSESATPESGPGSEPATSGSETPGTSESATPESGPGTSTEPSEGSAPGSPAGSPTSTEEGTSESATPESGPGSEPATSGSETPGTSESATPESGPGSPAGSPTSTEEGSPAGSPTSTEEGTSTEPSEGSAPGTSESATPESGPGTSESATPESGPGTSESATPESGPGSEPATSGSETPGSEPATSGSETPGSPAGSPTSTEEGTSTEPSEGSAPGTSTEPSEGSAPGSEPATSGSETPGTSESATPESGPGTSTEPSEGSAPTAEAAGCGTAEAAR

SEQ ID NO: 196 - protein, 918 aa, synthetic construct
  REGION 1..918: note = Description of Artificial Sequence: Synthetic polypeptide
ATAEAAGCGTAEAAGSPAGSPTSTEEGTSESATPESGPGTSTEPSEGSAPGSPAGSPTSTEEGTSTEPSEGSAPGTSTEPSEGSAPGTSESATPESGPGSEPATSGSETPGSEPATSGSETPGSPAGSPTSTEEGTSESATPESGPGTSTEPSEGSAPGTSTEPSEGSAPGSPAGSPTSTEEGTSTEPSEGSAPGTSTEPSEGSAPGTSESATPESGPGTSTEPSEGSAPGTSESATPESGPGSEPATSGSETPGTSTEPSEGSAPGTSTEPSEGSAPGTSESATPESGPGTSESATPESGPTAEAAGCGTAEAAGSPAGSPTSTEEGTSESATPESGPGSEPATSGSETPGTSESATPESGPGTSTEPSEGSAPGTSTEPSEGSAPGTSTEPSEGSAPGTSTEPSEGSAPGTSTEPSEGSAPGTSTEPSEGSAPGSPAGSPTSTEEGTSTEPSEGSAPGTSESATPESGPGSEPATSGSETPGTSESATPESGPGSEPATSGSETPGTSESATPESGPGTSTEPSEGSAPGTSESATPESGPGSPAGSPTSTEEGSPAGSPTSTEEGSPAGSPTSTEEGTSESATPESGPGTSTEPSEGSAPTAEAAGCGTAEAAGTSESATPESGPGSEPATSGSETPGTSESATPESGPGSEPATSGSETPGTSESATPESGPGTSTEPSEGSAPGSPAGSPTSTEEGTSESATPESGPGSEPATSGSETPGTSESATPESGPGSPAGSPTSTEEGSPAGSPTSTEEGTSTEPSEGSAPGTSESATPESGPGTSESATPESGPGTSESATPESGPGSEPATSGSETPGSEPATSGSETPGSPAGSPTSTEEGTSTEPSEGSAPGTSTEPSEGSAPGSEPATSGSETPGTSESATPESGPGTSTEPSEGSAPTAEAAGCGTAEAAR

SEQ ID NO: 197 - protein, 931 aa, synthetic construct
  REGION 1..931: note = Description of Artificial Sequence: Synthetic polypeptide
ATAEAAGCGTAEAAGSPAGSPTSTEEGTSESATPESGPGTSTEPSEGSAPGSPAGSPTSTEEGTSTEPSEGSAPGTSTEPSEGSAPGTSESATPESGPGSEPATSGSETPGSEPATSGSETPGSPAGSPTSTEEGTSESATPESGPGTSTEPSEGSAPGTSTEPSEGSAPGSPAGSPTSTEEGTSTEPSEGSAPGTSTEPSEGSAPGTSESATPESGPGTSTEPSEGSAPTAEAAGCGTAEAAGTSESATPESGPGSEPATSGSETPGTSTEPSEGSAPGTSTEPSEGSAPGTSESATPESGPGTSESATPESGPGSPAGSPTSTEEGTSESATPESGPGSEPATSGSETPGTSESATPESGPGTSTEPSEGSAPGTSTEPSEGSAPGTSTEPSEGSAPGTSTEPSEGSAPGTSTEPSEGSAPGTSTEPSEGSAPGSPAGSPTSTEEGTSTEPSEGSAPTAEAAGCGTAEAAGTSESATPESGPGSEPATSGSETPGTSESATPESGPGSEPATSGSETPGTSESATPESGPGTSTEPSEGSAPGTSESATPESGPGSPAGSPTSTEEGSPAGSPTSTEEGSPAGSPTSTEEGTSESATPESGPGTSTEPSEGSAPGTSESATPESGPGSEPATSGSETPGTSESATPESGPGSEPATSGSETPGTSESATPESGPGTSTEPSEGSAPTAEAAGCGTAEAAGSPAGSPTSTEEGTSESATPESGPGSEPATSGSETPGTSESATPESGPGSPAGSPTSTEEGSPAGSPTSTEEGTSTEPSEGSAPGTSESATPESGPGTSESATPESGPGTSESATPESGPGSEPATSGSETPGSEPATSGSETPGSPAGSPTSTEEGTSTEPSEGSAPGTSTEPSEGSAPGSEPATSGSETPGTSESATPESGPGTSTEPSEGSAPTAEAAGCGTAEAAR

SEQ ID NO: 198 - protein, 944 aa, synthetic construct
  REGION 1..944: note = Description of Artificial Sequence: Synthetic polypeptide
ATAEAAGCGTAEAAGSPAGSPTSTEEGTSESATPESGPGTSTEPSEGSAPGSPAGSPTSTEEGTSTEPSEGSAPGTSTEPSEGSAPGTSESATPESGPGSEPATSGSETPGSEPATSGSETPGSPAGSPTSTEEGTSESATPESGPGTSTEPSEGSAPGTSTEPSEGSAPGSPAGSPTSTEEGTSTETAEAAGCGTAEAAPSEGSAPGTSTEPSEGSAPGTSESATPESGPGTSTEPSEGSAPGTSESATPESGPGSEPATSGSETPGTSTEPSEGSAPGTSTEPSEGSAPGTSESATPESGPGTSESATPESGPGSPAGSPTSTEEGTSESATPESGPGSEPATSGSETPGTSESATPESGPGTSTEPSEGSTAEAAGCGTAEAAAPGTSTEPSEGSAPGTSTEPSEGSAPGTSTEPSEGSAPGTSTEPSEGSAPGTSTEPSEGSAPGSPAGSPTSTEEGTSTEPSEGSAPGTSESATPESGPGSEPATSGSETPGTSESATPESGPGSEPATSGSETPGTSESATPESGPGTSTEPSEGSAPGTSESATPESGPGSTAEAAGCGTAEAAPAGSPTSTEEGSPAGSPTSTEEGSPAGSPTSTEEGTSESATPESGPGTSTEPSEGSAPGTSESATPESGPGSEPATSGSETPGTSESATPESGPGSEPATSGSETPGTSESATPESGPGTSTEPSEGSAPGSPAGSPTSTEEGTSESATPESGPGSEPATSGSETPGTSESATTAEAAGCGTAEAAPESGPGSPAGSPTSTEEGSPAGSPTSTEEGTSTEPSEGSAPGTSESATPESGPGTSESATPESGPGTSESATPESGPGSEPATSGSETPGSEPATSGSETPGSPAGSPTSTEEGTSTEPSEGSAPGTSTEPSEGSAPGSEPATSGSETPGTSESATPESGPGTSTEPSEGSAPTAEAAGCGTAEAAR

SEQ ID NO: 199 - protein, 957 aa, synthetic construct
  REGION 1..957: note = Description of Artificial Sequence: Synthetic polypeptide
ATAEAAGCGTAEAAGSPAGSPTSTEEGTSESATPESGPGTSTEPSEGSAPGSPAGSPTSTEEGTSTEPSEGSAPGTSTEPSEGSAPGTSESATPESGPGSEPATSGSETPGSEPATSGSETPGSPAGSPTSTEEGTSESATPESGPGTSTEPSEGSAPTAEAAGCGTAEAAGTSTEPSEGSAPGSPAGSPTSTEEGTSTEPSEGSAPGTSTEPSEGSAPGTSESATPESGPGTSTEPSEGSAPGTSESATPESGPGSEPATSGSETPGTSTEPSEGSAPGTSTEPSEGSAPGTSESATPESGPGTSESATPESGPTAEAAGCGTAEAAGSPAGSPTSTEEGTSESATPESGPGSEPATSGSETPGTSESATPESGPGTSTEPSEGSAPGTSTEPSEGSAPGTSTEPSEGSAPGTSTEPSEGSAPGTSTEPSEGSAPGTSTEPSEGSAPGSPAGSPTSTEEGTSTEPSEGSAPTAEAAGCGTAEAAGTSESATPESGPGSEPATSGSETPGTSESATPESGPGSEPATSGSETPGTSESATPESGPGTSTEPSEGSAPGTSESATPESGPGSPAGSPTSTEEGSPAGSPTSTEEGSPAGSPTSTEEGTSESATPESGPGTSTEPSEGSAPTAEAAGCGTAEAAGTSESATPESGPGSEPATSGSETPGTSESATPESGPGSEPATSGSETPGTSESATPESGPGTSTEPSEGSAPGSPAGSPTSTEEGTSESATPESGPGSEPATSGSETPGTSESATPESGPGSPAGSPTSTEEGSPAGSPTSTEETAEAAGCGTAEAAGTSTEPSEGSAPGTSESATPESGPGTSESATPESGPGTSESATPESGPGSEPATSGSETPGSEPATSGSETPGSPAGSPTSTEEGTSTEPSEGSAPGTSTEPSEGSAPGSEPATSGSETPGTSESATPESGPGTSTEPSEGSAPTAEAAGCGTAEAAR

SEQ ID NO: 200 - protein, 970 aa, synthetic construct
  REGION 1..970: note = Description of Artificial Sequence: Synthetic polypeptide
ATAEAAGCGTAEAAGSPAGSPTSTEEGTSESATPESGPGTSTEPSEGSAPGSPAGSPTSTEEGTSTEPSEGSAPGTSTEPSEGSAPGTSESATPESGPGSEPATSGSETPGSEPATSGSETPGSPAGSPTSTEEGTSTAEAAGCGTAEAAESATPESGPGTSTEPSEGSAPGTSTEPSEGSAPGSPAGSPTSTEEGTSTEPSEGSAPGTSTEPSEGSAPGTSESATPESGPGTSTEPSEGSAPGTSESATPESGPGSEPATSGSETPGTSTEPSTAEAAGCGTAEAAEGSAPGTSTEPSEGSAPGTSESATPESGPGTSESATPESGPGSPAGSPTSTEEGTSESATPESGPGSEPATSGSETPGTSESATPESGPGTSTEPSEGSAPGTSTEPSEGSAPGTSTEPSEGSTAEAAGCGTAEAAAPGTSTEPSEGSAPGTSTEPSEGSAPGTSTEPSEGSAPGSPAGSPTSTEEGTSTEPSEGSAPGTSESATPESGPGSEPATSGSETPGTSESATPESGPGSEPATSGSETPGTSESATPESGPGTTAEAAGCGTAEAASTEPSEGSAPGTSESATPESGPGSPAGSPTSTEEGSPAGSPTSTEEGSPAGSPTSTEEGTSESATPESGPGTSTEPSEGSAPGTSESATPESGPGSEPATSGSETPGTSESATPESGPGSEPATAEAAGCGTAEAATSGSETPGTSESATPESGPGTSTEPSEGSAPGSPAGSPTSTEEGTSESATPESGPGSEPATSGSETPGTSESATPESGPGSPAGSPTSTEEGSPAGSPTSTEEGTSTEPSEGSAPGTSESATPETAEAAGCGTAEAASGPGTSESATPESGPGTSESATPESGPGSEPATSGSETPGSEPATSGSETPGSPAGSPTSTEEGTSTEPSEGSAPGTSTEPSEGSAPGSEPATSGSETPGTSESATPESGPGTSTEPSEGSAPTAEAAGCGTAEAAR

SEQ ID NO: 201 - protein, 879 aa, synthetic construct
  REGION 1..879: note = Description of Artificial Sequence: Synthetic polypeptide
ATAEAAGCGTAEAAGSPAGSPTSTEEGTSESATPESGPGTSTEPSEGSAPGSPAGSPTSTEEGTSTEPSEGSAPGTSTEPSEGSAPGTSESATPESGPGSEPATSGSETPGSEPATSGSETPGSPAGSPTSTEEGTSESATPESGPGTSTEPSEGSAPGTSTEPSEGSAPGSPAGSPTSTEEGTSTEPSEGSAPGTSTEPSEGSAPGTSESATPESGPGTSTEPSEGSAPGTSESATPESGPGSEPATSGSETPGTSTEPSEGSAPGTSTEPSEGSAPGTSESATPESGPGTSESATPESGPGSPAGSPTSTEEGTSESATPESGPGSEPATSGSETPGTSESATPESGPGTSTEPSEGSAPGTSTEPSEGSAPGTSTEPSEGSAPGTSTEPSEGSAPGTSTEPSEGSAPGTSTEPSEGSAPGSPAGSPTSTEEGTSTEPSEGSAPGTSESATPESGPGSEPATSGSETPGTSESATPESGPGSEPATSGSETPGTSESATPESGPGTSTEPSEGSAPGTSESATPESGPGSPAGSPTSTEEGSPAGSPTSTEEGSPAGSPTSTEEGTSESATPESGPGTSTEPSEGSAPGTSESATPESGPGSEPATSGSETPGTSESATPESGPGSEPATSGSETPGTSESATPESGPGTSTEPSEGSAPGSPAGSPTSTEEGTSESATPESGPGSEPATSGSETPGTSESATPESGPGSPAGSPTSTEEGSPAGSPTSTEEGTSTEPSEGSAPGTSESATPESGPGTSESATPESGPGTSESATPESGPGSEPATSGSETPGSEPATSGSETPGSPAGSPTSTEEGTSTEPSEGSAPGTSTEPSEGSAPGSEPATSGSETPGTSESATPESGPGTSTEPSEGSAPR

SEQ ID NO: 202 - protein, 879 aa, synthetic construct
  REGION 1..879: note = Description of Artificial Sequence: Synthetic polypeptide
AGSPAGSPTSTEEGTSESATPESGPGTSTEPSEGSAPGSPAGSPTSTEEGTSTEPSEGSAPGTSTEPSEGSAPGTSESATPESGPGSEPATSGSETPGSEPATSGSETPGSPAGSPTSTEEGTSESATPESGPGTSTEPSEGSAPGTSTEPSEGSAPGSPAGSPTSTEEGTSTEPSEGSAPGTSTEPSEGSAPGTSESATPESGPGTSTEPSEGSAPGTSESATPESGPGSEPATSGSETPGTSTEPSEGSAPGTSTEPSEGSAPGTSESATPESGPGTSESATPESGPGSPAGSPTSTEEGTSESATPESGPGSEPATSGSETPGTSESATPESGPGTSTEPSEGSAPGTSTEPSEGSAPGTSTEPSEGSAPGTSTEPSEGSAPGTSTEPSEGSAPGTSTEPSEGSAPGSPAGSPTSTEEGTSTEPSEGSAPGTSESATPESGPGSEPATSGSETPGTSESATPESGPGSEPATSGSETPGTSESATPESGPGTSTEPSEGSAPGTSESATPESGPGSPAGSPTSTEEGSPAGSPTSTEEGSPAGSPTSTEEGTSESATPESGPGTSTEPSEGSAPGTSESATPESGPGSEPATSGSETPGTSESATPESGPGSEPATSGSETPGTSESATPESGPGTSTEPSEGSAPGSPAGSPTSTEEGTSESATPESGPGSEPATSGSETPGTSESATPESGPGSPAGSPTSTEEGSPAGSPTSTEEGTSTEPSEGSAPGTSESATPESGPGTSESATPESGPGTSESATPESGPGSEPATSGSETPGSEPATSGSETPGSPAGSPTSTEEGTSTEPSEGSAPGTSTEPSEGSAPGSEPATSGSETPGTSESATPESGPGTSTEPSEGSAPTAEAAGCGTAEAAR

SEQ ID NO: 203 - protein, 892 aa, synthetic construct
  REGION 1..892: note = Description of Artificial Sequence: Synthetic polypeptide
ATAEAAGCGTAEAAGSPAGSPTSTEEGTSESATPESGPGTSTEPSEGSAPGSPAGSPTSTEEGTSTEPSEGSAPGTSTEPSEGSAPGTSESATPESGPGSEPATSGSETPGSEPATSGSETPGSPAGSPTSTEEGTSESATPESGPGTSTEPSEGSAPGTSTEPSEGSAPGSPAGSPTSTEEGTSTEPSEGSAPGTSTEPSEGSAPGTSESATPESGPGTSTEPSEGSAPGTSESATPESGPGSEPATSGSETPGTSTEPSEGSAPGTSTEPSEGSAPGTSESATPESGPGTSESATPESGPGSPAGSPTSTEEGTSESATPESGPGSEPATSGSETPGTSESATPESGPGTSTEPSEGSAPGTSTEPSEGSAPGTSTEPSEGSAPGTSTEPSEGSAPGTSTEPSEGSAPGTSTEPSEGSAPGSPAGSPTSTEEGTSTEPSEGSAPTAEAAGCGTAEAAGTSESATPESGPGSEPATSGSETPGTSESATPESGPGSEPATSGSETPGTSESATPESGPGTSTEPSEGSAPGTSESATPESGPGSPAGSPTSTEEGSPAGSPTSTEEGSPAGSPTSTEEGTSESATPESGPGTSTEPSEGSAPGTSESATPESGPGSEPATSGSETPGTSESATPESGPGSEPATSGSETPGTSESATPESGPGTSTEPSEGSAPGSPAGSPTSTEEGTSESATPESGPGSEPATSGSETPGTSESATPESGPGSPAGSPTSTEEGSPAGSPTSTEEGTSTEPSEGSAPGTSESATPESGPGTSESATPESGPGTSESATPESGPGSEPATSGSETPGSEPATSGSETPGSPAGSPTSTEEGTSTEPSEGSAPGTSTEPSEGSAPGSEPATSGSETPGTSESATPESGPGTSTEPSEGSAPR

SEQ ID NO: 204 - protein, 892 aa, synthetic construct
  REGION 1..892: note = Description of Artificial Sequence: Synthetic polypeptide
AGSPAGSPTSTEEGTSESATPESGPGTSTEPSEGSAPGSPAGSPTSTEEGTSTEPSEGSAPGTSTEPSEGSAPGTSESATPESGPGSEPATSGSETPGSEPATSGSETPGSPAGSPTSTEEGTSESATPESGPGTSTEPSEGSAPGTSTEPSEGSAPGSPAGSPTSTEEGTSTEPSEGSAPGTSTEPSEGSAPGTSESATPESGPGTSTEPSEGSAPGTSESATPESGPGSEPATSGSETPGTSTEPSEGSAPGTSTEPSEGSAPGTSESATPESGPGTSESATPESGPGSPAGSPTSTEEGTSESATPESGPGSEPATSGSETPGTSESATPESGPGTSTEPSEGSAPGTSTEPSEGSAPGTSTEPSEGSAPGTSTEPSEGSAPGTSTEPSEGSAPGTSTTAEAAGCGTAEAAEPSEGSAPGSPAGSPTSTEEGTSTEPSEGSAPGTSESATPESGPGSEPATTAEAAGCGTAEAASGSETPGTSESATPESGPGSEPATSGSETPGTSESATPESGPGTSTEPSEGSAPGTSESATPESGPGSPAGSPTSTEEGSPAGSPTSTEEGSPAGSPTSTEEGTSESATPESGPGTSTEPSEGSAPGTSESATPESGPGSEPATSGSETPGTSESATPESGPGSEPATSGSETPGTSESATPESGPGTSTEPSEGSAPGSPAGSPTSTEEGTSESATPESGPGSEPATSGSETPGTSESATPESGPGSPAGSPTSTEEGSPAGSPTSTEEGTSTEPSEGSAPGTSESATPESGPGTSESATPESGPGTSESATPESGPGSEPATSGSETPGSEPATSGSETPGSPAGSPTSTEEGTSTEPSEGSAPGTSTEPSEGSAPGSEPATSGSETPGTSESATPESGPGTSTEPSEGSAPR

SEQ ID NO: 205 - protein, 892 aa, synthetic construct
  REGION 1..892: note = Description of Artificial Sequence: Synthetic polypeptide
AGSPAGSPTSTEEGTSESATPESGPGTSTEPSEGSAPGSPAGSPTSTEEGTSTEPSEGSAPGTSTEPSEGSAPGTSESATPESGPGSEPATSGSETPGSEPATSGSETPGSPAGSPTSTEEGTSESATPESGPGTSTEPSEGSAPGTSTEPSEGSAPGSPAGSPTSTEEGTSTEPSEGSAPGTSTEPSEGSAPGTSESATPESGPGTSTEPSEGSAPGTSESATPESGPGSEPATSGSETPGTSTEPSEGSAPGTSTEPSEGSAPGTSESATPESGPGTSESATPESGPGSPAGSPTSTEEGTSESATPESGPGSEPATSGSETPGTSESATPESGPGTSTEPSEGSAPGTSTEPSEGSAPGTSTEPSEGSAPGTSTEPSEGSAPGTSTEPSEGSAPGTSTEPSEGSAPGSPAGSPTSTEEGTSTEPSEGSAPTAEAAGCGTAEAAGTSESATPESGPGSEPATSGSETPGTSESATPESGPGSEPATSGSETPGTSESATPESGPGTSTEPSEGSAPGTSESATPESGPGSPAGSPTSTEEGSPAGSPTSTEEGSPAGSPTSTEEGTSESATPESGPGTSTEPSEGSAPGTSESATPESGPGSEPATSGSETPGTSESATPESGPGSEPATSGSETPGTSESATPESGPGTSTEPSEGSAPGSPAGSPTSTEEGTSESATPESGPGSEPATSGSETPGTSESATPESGPGSPAGSPTSTEEGSPAGSPTSTEEGTSTEPSEGSAPGTSESATPESGPGTSESATPESGPGTSESATPESGPGSEPATSGSETPGSEPATSGSETPGSPAGSPTSTEEGTSTEPSEGSAPGTSTEPSEGSAPGSEPATSGSETPGTSESATPESGPGTSTEPSEGSAPTAEAAGCGTAEAAR

SEQ ID NO: 206 - protein, 871 aa, synthetic construct
  REGION 1..871: note = Description of Artificial Sequence: Synthetic polypeptide
AGSPAGSPTSTEEGTSESATPESGPGTSTEPSEGSAPGSPAGSPTSTEEGTSTEPSEGSAPGTSTEPSEGSAPGTSESATPESGPGSEPATSGSETPGSEPATSGSETPGSPAGSPTSTEEGTSESATPESGPGTSTEPSEGSAPGTSTEPSEGSAPGSPAGSPTSTEEGTSTEPSEGSAPGTSTEPSEGSAPGTSESATPESGPGTSTEPSEGSAPGTSESATPESGPGSEPATSGSETPGTSTEPSEGSAPGTSTEPSEGSAPGTSESATPESGPGTSESATPESGPGSPAGSPTSTEEGTSESATPESGPGSEPATSGSETPGTSESATPESGPGTSTEPSEGSAPGTSTEPSEGSAPGTSTEPSEGSAPGTSTEPSEGSAPGTSTEPSEGSAPGTSTEPSEGSAPGSPAGSPTSTEEGTSTEPSEGSAPGGKPGGTSESATPESGPGSEPATSGSETPGTSESATPESGPGSEPATSGSETPGTSESATPESGPGTSTEPSEGSAPGTSESATPESGPGSPAGSPTSTEEGSPAGSPTSTEEGSPAGSPTSTEEGTSESATPESGPGTSTEPSEGSAPGTSESATPESGPGSEPATSGSETPGTSESATPESGPGSEPATSGSETPGTSESATPESGPGTSTEPSEGSAPGSPAGSPTSTEEGTSESATPESGPGSEPATSGSETPGTSESATPESGPGSPAGSPTSTEEGSPAGSPTSTEEGTSTEPSEGSAPGTSESATPESGPGTSESATPESGPGTSESATPESGPGSEPATSGSETPGSEPATSGSETPGSPAGSPTSTEEGTSTEPSEGSAPGTSTEPSEGSAPGSEPATSGSETPGTSESATPESGPGTSTEPSEGSAPR

SEQ ID NO: 207 - protein, 876 aa, synthetic construct
  REGION 1..876: note = Description of Artificial Sequence: Synthetic polypeptide
AGGKPGGSPAGSPTSTEEGTSESATPESGPGTSTEPSEGSAPGSPAGSPTSTEEGTSTEPSEGSAPGTSTEPSEGSAPGTSESATPESGPGSEPATSGSETPGSEPATSGSETPGSPAGSPTSTEEGTSESATPESGPGTSTEPSEGSAPGTSTEPSEGSAPGSPAGSPTSTEEGTSTEPSEGSAPGTSTEPSEGSAPGTSESATPESGPGTSTEPSEGSAPGTSESATPESGPGSEPATSGSETPGTSTEPSEGSAPGTSTEPSEGSAPGTSESATPESGPGTSESATPESGPGSPAGSPTSTEEGTSESATPESGPGSEPATSGSETPGTSESATPESGPGTSTEPSEGSAPGTSTEPSEGSAPGTSTEPSEGSAPGTSTEPSEGSAPGTSTEPSEGSAPGTSTEPSEGSAPGSPAGSPTSTEEGTSTEPSEGSAPGTSESATPESGPGSEPATSGSETPGTSESATPESGPGSEPATSGSETPGTSESATPESGPGTSTEPSEGSAPGTSESATPESGPGSPAGSPTSTEEGSPAGSPTSTEEGSPAGSPTSTEEGTSESATPESGPGTSTEPSEGSAPGTSESATPESGPGSEPATSGSETPGTSESATPESGPGSEPATSGSETPGTSESATPESGPGTSTEPSEGSAPGSPAGSPTSTEEGTSESATPESGPGSEPATSGSETPGTSESATPESGPGSPAGSPTSTEEGSPAGSPTSTEEGTSTEPSEGSAPGTSESATPESGPGTSESATPESGPGTSESATPESGPGSEPATSGSETPGSEPATSGSETPGSPAGSPTSTEEGTSTEPSEGSAPGTSTEPSEGSAPGSEPATSGSETPGTSESATPESGPGTSTEPSEGSAPGGKPGR

SEQ ID NO: 208 - protein, 881 aa, synthetic construct
  REGION 1..881: note = Description of Artificial Sequence: Synthetic polypeptide
AGGKPGGSPAGSPTSTEEGTSESATPESGPGTSTEPSEGSAPGSPAGSPTSTEEGTSTEPSEGSAPGTSTEPSEGSAPGTSESATPESGPGSEPATSGSETPGSEPATSGSETPGSPAGSPTSTEEGTSESATPESGPGTSTEPSEGSAPGTSTEPSEGSAPGSPAGSPTSTEEGTSTEPSEGSAPGTSTEPSEGSAPGTSESATPESGPGTSTEPSEGSAPGTSESATPESGPGSEPATSGSETPGTSTEPSEGSAPGTSTEPSEGSAPGTSESATPESGPGTSESATPESGPGSPAGSPTSTEEGTSESATPESGPGSEPATSGSETPGTSESATPESGPGTSTEPSEGSAPGTSTEPSEGSAPGTSTEPSEGSAPGTSTEPSEGSAPGTSTEPSEGSAPGTSTEPSEGSAPGSPAGSPTSTEEGTSTEPSEGSAPGGKPGGTSESATPESGPGSEPATSGSETPGTSESATPESGPGSEPATSGSETPGTSESATPESGPGTSTEPSEGSAPGTSESATPESGPGSPAGSPTSTEEGSPAGSPTSTEEGSPAGSPTSTEEGTSESATPESGPGTSTEPSEGSAPGTSESATPESGPGSEPATSGSETPGTSESATPESGPGSEPATSGSETPGTSESATPESGPGTSTEPSEGSAPGSPAGSPTSTEEGTSESATPESGPGSEPATSGSETPGTSESATPESGPGSPAGSPTSTEEGSPAGSPTSTEEGTSTEPSEGSAPGTSESATPESGPGTSESATPESGPGTSESATPESGPGSEPATSGSETPGSEPATSGSETPGSPAGSPTSTEEGTSTEPSEGSAPGTSTEPSEGSAPGSEPATSGSETPGTSESATPESGPGTSTEPSEGSAPGGKPGR

SEQ ID NO: 209 - protein, 886 aa, synthetic construct
  REGION 1..886: note = Description of Artificial Sequence: Synthetic polypeptide
AGGKPGGSPAGSPTSTEEGTSESATPESGPGTSTEPSEGSAPGSPAGSPTSTEEGTSTEPSEGSAPGTSTEPSEGSAPGTSESATPESGPGSEPATSGSETPGSEPATSGSETPGSPAGSPTSTEEGTSESATPESGPGTSTEPSEGSAPGTSTEPSEGSAPGSPAGSPTSTEEGTSTEPSEGSAPGTSTEPSEGSAPGTSESATPESGPGTSTEPSEGSAPGTSESATPESGPGSEPATSGSETPGTSTEPSEGSAPGTSTEPSEGSAPGTSESATPESGPGTSESATPESGPGGKPGGSPAGSPTSTEEGTSESATPESGPGSEPATSGSETPGTSESATPESGPGTSTEPSEGSAPGTSTEPSEGSAPGTSTEPSEGSAPGTSTEPSEGSAPGTSTEPSEGSAPGTSTEPSEGSAPGSPAGSPTSTEEGTSTEPSEGSAPGTSESATPESGPGSEPATSGSETPGTSESATPESGPGSEPATSGSETPGTSESATPESGPGTSTEPSEGSAPGTSESATPESGPGSPAGSPTSTEEGSPAGSPTSTEEGSPAGSPTSTEEGTSESATPESGPGTSTEPSEGSAPGGKPGGTSESATPESGPGSEPATSGSETPGTSESATPESGPGSEPATSGSETPGTSESATPESGPGTSTEPSEGSAPGSPAGSPTSTEEGTSESATPESGPGSEPATSGSETPGTSESATPESGPGSPAGSPTSTEEGSPAGSPTSTEEGTSTEPSEGSAPGTSESATPESGPGTSESATPESGPGTSESATPESGPGSEPATSGSETPGSEPATSGSETPGSPAGSPTSTEEGTSTEPSEGSAPGTSTEPSEGSAPGSEPATSGSETPGTSESATPESGPGTSTEPSEGSAPGGKPGR

SEQ ID NO: 210 - protein, 891 aa, synthetic construct
  REGION 1..891: note = Description of Artificial Sequence: Synthetic polypeptide
AGGKPGGSPAGSPTSTEEGTSESATPESGPGTSTEPSEGSAPGSPAGSPTSTEEGTSTEPSEGSAPGTSTEPSEGSAPGTSESATPESGPGSEPATSGSETPGSEPATSGSETPGSPAGSPTSTEEGTSESATPESGPGTSTEPSEGSAPGTSTEPSEGSAPGSPAGSPTSTEEGTSTEPSEGSAPGTSTEPSEGSAPGTSESATPESGPGTSTEPSEGSAPGGKPGGTSESATPESGPGSEPATSGSETPGTSTEPSEGSAPGTSTEPSEGSAPGTSESATPESGPGTSESATPESGPGSPAGSPTSTEEGTSESATPESGPGSEPATSGSETPGTSESATPESGPGTSTEPSEGSAPGTSTEPSEGSAPGTSTEPSEGSAPGTSTEPSEGSAPGTSTEPSEGSAPGTSTEPSEGSAPGSPAGSPTSTEEGTSTEPSEGSAPGGKPGGTSESATPESGPGSEPATSGSETPGTSESATPESGPGSEPATSGSETPGTSESATPESGPGTSTEPSEGSAPGTSESATPESGPGSPAGSPTSTEEGSPAGSPTSTEEGSPAGSPTSTEEGTSESATPESGPGTSTEPSEGSAPGTSESATPESGPGSEPATSGSETPGTSESATPESGPGSEPATSGSETPGTSESATPESGPGTSTEPSEGSAPGGKPGGSPAGSPTSTEEGTSESATPESGPGSEPATSGSETPGTSESATPESGPGSPAGSPTSTEEGSPAGSPTSTEEGTSTEPSEGSAPGTSESATPESGPGTSESATPESGPGTSESATPESGPGSEPATSGSETPGSEPATSGSETPGSPAGSPTSTEEGTSTEPSEGSAPGTSTEPSEGSAPGSEPATSGSETPGTSESATPESGPGTSTEPSEGSAPGGKPGR

SEQ ID NO: 211 - protein, 896 aa, synthetic construct
  REGION 1..896: note = Description of Artificial Sequence: Synthetic polypeptide
AGGKPGGSPAGSPTSTEEGTSESATPESGPGTSTEPSEGSAPGSPAGSPTSTEEGTSTEPSEGSAPGTSTEPSEGSAPGTSESATPESGPGSEPATSGSETPGSEPATSGSETPGSPAGSPTSTEEGTSESATPESGPGTSTEPSEGSAPGTSTEPSEGSAPGSPAGSPTSTEEGTSTEGGKPGPSEGSAPGTSTEPSEGSAPGTSESATPESGPGTSTEPSEGSAPGTSESATPESGPGSEPATSGSETPGTSTEPSEGSAPGTSTEPSEGSAPGTSESATPESGPGTSESATPESGPGSPAGSPTSTEEGTSESATPESGPGSEPATSGSETPGTSESATPESGPGTSTEPSEGSGGKPGAPGTSTEPSEGSAPGTSTEPSEGSAPGTSTEPSEGSAPGTSTEPSEGSAPGTSTEPSEGSAPGSPAGSPTSTEEGTSTEPSEGSAPGTSESATPESGPGSEPATSGSETPGTSESATPESGPGSEPATSGSETPGTSESATPESGPGTSTEPSEGSAPGTSESATPESGPGSGGKPGPAGSPTSTEEGSPAGSPTSTEEGSPAGSPTSTEEGTSESATPESGPGTSTEPSEGSAPGTSESATPESGPGSEPATSGSETPGTSESATPESGPGSEPATSGSETPGTSESATPESGPGTSTEPSEGSAPGSPAGSPTSTEEGTSESATPESGPGSEPATSGSETPGTSESATGGKPGPESGPGSPAGSPTSTEEGSPAGSPTSTEEGTSTEPSEGSAPGTSESATPESGPGTSESATPESGPGTSESATPESGPGSEPATSGSETPGSEPATSGSETPGSPAGSPTSTEEGTSTEPSEGSAPGTSTEPSEGSAPGSEPATSGSETPGTSESATPESGPGTSTEPSEGSAPGGKPGR

SEQ ID NO: 212 - protein, 901 aa, synthetic construct
  REGION 1..901: note = Description of Artificial Sequence: Synthetic polypeptide
AGGKPGGSPAGSPTSTEEGTSESATPESGPGTSTEPSEGSAPGSPAGSPTSTEEGTSTEPSEGSAPGTSTEPSEGSAPGTSESATPESGPGSEPATSGSETPGSEPATSGSETPGSPAGSPTSTEEGTSESATPESGPGTSTEPSEGSAPGGKPGGTSTEPSEGSAPGSPAGSPTSTEEGTSTEPSEGSAPGTSTEPSEGSAPGTSESATPESGPGTSTEPSEGSAPGTSESATPESGPGSEPATSGSETPGTSTEPSEGSAPGTSTEPSEGSAPGTSESATPESGPGTSESATPESGPGGKPGGSPAGSPTSTEEGTSESATPESGPGSEPATSGSETPGTSESATPESGPGTSTEPSEGSAPGTSTEPSEGSAPGTSTEPSEGSAPGTSTEPSEGSAPGTSTEPSEGSAPGTSTEPSEGSAPGSPAGSPTSTEEGTSTEPSEGSAPGGKPGGTSESATPESGPGSEPATSGSETPGTSESATPESGPGSEPATSGSETPGTSESATPESGPGTSTEPSEGSAPGTSESATPESGPGSPAGSPTSTEEGSPAGSPTSTEEGSPAGSPTSTEEGTSESATPESGPGTSTEPSEGSAPGGKPGGTSESATPESGPGSEPATSGSETPGTSESATPESGPGSEPATSGSETPGTSESATPESGPGTSTEPSEGSAPGSPAGSPTSTEEGTSESATPESGPGSEPATSGSETPGTSESATPESGPGSPAGSPTSTEEGSPAGSPTSTEEGGKPGGTSTEPSEGSAPGTSESATPESGPGTSESATPESGPGTSESATPESGPGSEPATSGSETPGSEPATSGSETPGSPAGSPTSTEEGTSTEPSEGSAPGTSTEPSEGSAPGSEPATSGSETPGTSESATPESGPGTSTEPSEGSAPGGKPGR

SEQ ID NO: 213 - protein, 906 aa, synthetic construct
  REGION 1..906: note = Description of Artificial Sequence: Synthetic polypeptide
AGGKPGGSPAGSPTSTEEGTSESATPESGPGTSTEPSEGSAPGSPAGSPTSTEEGTSTEPSEGSAPGTSTEPSEGSAPGTSESATPESGPGSEPATSGSETPGSEPATSGSETPGSPAGSPTSTEEGTSGGKPGESATPESGPGTSTEPSEGSAPGTSTEPSEGSAPGSPAGSPTSTEEGTSTEPSEGSAPGTSTEPSEGSAPGTSESATPESGPGTSTEPSEGSAPGTSESATPESGPGSEPATSGSETPGTSTEPSGGKPGEGSAPGTSTEPSEGSAPGTSESATPESGPGTSESATPESGPGSPAGSPTSTEEGTSESATPESGPGSEPATSGSETPGTSESATPESGPGTSTEPSEGSAPGTSTEPSEGSAPGTSTEPSEGSGGKPGAPGTSTEPSEGSAPGTSTEPSEGSAPGTSTEPSEGSAPGSPAGSPTSTEEGTSTEPSEGSAPGTSESATPESGPGSEPATSGSETPGTSESATPESGPGSEPATSGSETPGTSESATPESGPGTGGKPGSTEPSEGSAPGTSESATPESGPGSPAGSPTSTEEGSPAGSPTSTEEGSPAGSPTSTEEGTSESATPESGPGTSTEPSEGSAPGTSESATPESGPGSEPATSGSETPGTSESATPESGPGSEPAGGKPGTSGSETPGTSESATPESGPGTSTEPSEGSAPGSPAGSPTSTEEGTSESATPESGPGSEPATSGSETPGTSESATPESGPGSPAGSPTSTEEGSPAGSPTSTEEGTSTEPSEGSAPGTSESATPEGGKPGSGPGTSESATPESGPGTSESATPESGPGSEPATSGSETPGSEPATSGSETPGSPAGSPTSTEEGTSTEPSEGSAPGTSTEPSEGSAPGSEPATSGSETPGTSESATPESGPGTSTEPSEGSAPGGKPGR

SEQ ID NO: 214 - protein, 871 aa, synthetic construct
  REGION 1..871: note = Description of Artificial Sequence: Synthetic polypeptide
AGGKPGGSPAGSPTSTEEGTSESATPESGPGTSTEPSEGSAPGSPAGSPTSTEEGTSTEPSEGSAPGTSTEPSEGSAPGTSESATPESGPGSEPATSGSETPGSEPATSGSETPGSPAGSPTSTEEGTSESATPESGPGTSTEPSEGSAPGTSTEPSEGSAPGSPAGSPTSTEEGTSTEPSEGSAPGTSTEPSEGSAPGTSESATPESGPGTSTEPSEGSAPGTSESATPESGPGSEPATSGSETPGTSTEPSEGSAPGTSTEPSEGSAPGTSESATPESGPGTSESATPESGPGSPAGSPTSTEEGTSESATPESGPGSEPATSGSETPGTSESATPESGPGTSTEPSEGSAPGTSTEPSEGSAPGTSTEPSEGSAPGTSTEPSEGSAPGTSTEPSEGSAPGTSTEPSEGSAPGSPAGSPTSTEEGTSTEPSEGSAPGTSESATPESGPGSEPATSGSETPGTSESATPESGPGSEPATSGSETPGTSESATPESGPGTSTEPSEGSAPGTSESATPESGPGSPAGSPTSTEEGSPAGSPTSTEEGSPAGSPTSTEEGTSESATPESGPGTSTEPSEGSAPGTSESATPESGPGSEPATSGSETPGTSESATPESGPGSEPATSGSETPGTSESATPESGPGTSTEPSEGSAPGSPAGSPTSTEEGTSESATPESGPGSEPATSGSETPGTSESATPESGPGSPAGSPTSTEEGSPAGSPTSTEEGTSTEPSEGSAPGTSESATPESGPGTSESATPESGPGTSESATPESGPGSEPATSGSETPGSEPATSGSETPGSPAGSPTSTEEGTSTEPSEGSAPGTSTEPSEGSAPGSEPATSGSETPGTSESATPESGPGTSTEPSEGSAPR

SEQ ID NO: 215 - protein, 871 aa, synthetic construct
  REGION 1..871: note = Description of Artificial Sequence: Synthetic polypeptide
AGSPAGSPTSTEEGTSESATPESGPGTSTEPSEGSAPGSPAGSPTSTEEGTSTEPSEGSAPGTSTEPSEGSAPGTSESATPESGPGSEPATSGSETPGSEPATSGSETPGSPAGSPTSTEEGTSESATPESGPGTSTEPSEGSAPGTSTEPSEGSAPGSPAGSPTSTEEGTSTEPSEGSAPGTSTEPSEGSAPGTSESATPESGPGTSTEPSEGSAPGTSESATPESGPGSEPATSGSETPGTSTEPSEGSAPGTSTEPSEGSAPGTSESATPESGPGTSESATPESGPGSPAGSPTSTEEGTSESATPESGPGSEPATSGSETPGTSESATPESGPGTSTEPSEGSAPGTSTEPSEGSAPGTSTEPSEGSAPGTSTEPSEGSAPGTSTEPSEGSAPGTSTEPSEGSAPGSPAGSPTSTEEGTSTEPSEGSAPGTSESATPESGPGSEPATSGSETPGTSESATPESGPGSEPATSGSETPGTSESATPESGPGTSTEPSEGSAPGTSESATPESGPGSPAGSPTSTEEGSPAGSPTSTEEGSPAGSPTSTEEGTSESATPESGPGTSTEPSEGSAPGTSESATPESGPGSEPATSGSETPGTSESATPESGPGSEPATSGSETPGTSESATPESGPGTSTEPSEGSAPGSPAGSPTSTEEGTSESATPESGPGSEPATSGSETPGTSESATPESGPGSPAGSPTSTEEGSPAGSPTSTEEGTSTEPSEGSAPGTSESATPESGPGTSESATPESGPGTSESATPESGPGSEPATSGSETPGSEPATSGSETPGSPAGSPTSTEEGTSTEPSEGSAPGTSTEPSEGSAPGSEPATSGSETPGTSESATPESGPGTSTEPSEGSAPGGKPGR

SEQ ID NO: 216 - protein, 876 aa, synthetic construct
  REGION 1..876: note = Description of Artificial Sequence: Synthetic polypeptide
AGGKPGGSPAGSPTSTEEGTSESATPESGPGTSTEPSEGSAPGSPAGSPTSTEEGTSTEPSEGSAPGTSTEPSEGSAPGTSESATPESGPGSEPATSGSETPGSEPATSGSETPGSPAGSPTSTEEGTSESATPESGPGTSTEPSEGSAPGTSTEPSEGSAPGSPAGSPTSTEEGTSTEPSEGSAPGTSTEPSEGSAPGTSESATPESGPGTSTEPSEGSAPGTSESATPESGPGSEPATSGSETPGTSTEPSEGSAPGTSTEPSEGSAPGTSESATPESGPGTSESATPESGPGSPAGSPTSTEEGTSESATPESGPGSEPATSGSETPGTSESATPESGPGTSTEPSEGSAPGTSTEPSEGSAPGTSTEPSEGSAPGTSTEPSEGSAPGTSTEPSEGSAPGTSTEPSEGSAPGSPAGSPTSTEEGTSTEPSEGSAPGGKPGGTSESATPESGPGSEPATSGSETPGTSESATPESGPGSEPATSGSETPGTSESATPESGPGTSTEPSEGSAPGTSESATPESGPGSPAGSPTSTEEGSPAGSPTSTEEGSPAGSPTSTEEGTSESATPESGPGTSTEPSEGSAPGTSESATPESGPGSEPATSGSETPGTSESATPESGPGSEPATSGSETPGTSESATPESGPGTSTEPSEGSAPGSPAGSPTSTEEGTSESATPESGPGSEPATSGSETPGTSESATPESGPGSPAGSPTSTEEGSPAGSPTSTEEGTSTEPSEGSAPGTSESATPESGPGTSESATPESGPGTSESATPESGPGSEPATSGSETPGSEPATSGSETPGSPAGSPTSTEEGTSTEPSEGSAPGTSTEPSEGSAPGSEPATSGSETPGTSESATPESGPGTSTEPSEGSAPR

SEQ ID NO: 217 - protein, 876 aa, synthetic construct
  REGION 1..876: note = Description of Artificial Sequence: Synthetic polypeptide
AGSPAGSPTSTEEGTSESATPESGPGTSTEPSEGSAPGSPAGSPTSTEEGTSTEPSEGSAPGTSTEPSEGSAPGTSESATPESGPGSEPATSGSETPGSEPATSGSETPGSPAGSPTSTEEGTSESATPESGPGTSTEPSEGSAPGTSTEPSEGSAPGSPAGSPTSTEEGTSTEPSEGSAPGTSTEPSEGSAPGTSESATPESGPGTSTEPSEGSAPGTSESATPESGPGSEPATSGSETPGTSTEPSEGSAPGTSTEPSEGSAPGTSESATPESGPGTSESATPESGPGSPAGSPTSTEEGTSESATPESGPGSEPATSGSETPGTSESATPESGPGTSTEPSEGSAPGTSTEPSEGSAPGTSTEPSEGSAPGTSTEPSEGSAPGTSTEPSEGSAPGTSTGGKPGEPSEGSAPGSPAGSPTSTEEGTSTEPSEGSAPGTSESATPESGPGSEPATGGKPGSGSETPGTSESATPESGPGSEPATSGSETPGTSESATPESGPGTSTEPSEGSAPGTSESATPESGPGSPAGSPTSTEEGSPAGSPTSTEEGSPAGSPTSTEEGTSESATPESGPGTSTEPSEGSAPGTSESATPESGPGSEPATSGSETPGTSESATPESGPGSEPATSGSETPGTSESATPESGPGTSTEPSEGSAPGSPAGSPTSTEEGTSESATPESGPGSEPATSGSETPGTSESATPESGPGSPAGSPTSTEEGSPAGSPTSTEEGTSTEPSEGSAPGTSESATPESGPGTSESATPESGPGTSESATPESGPGSEPATSGSETPGSEPATSGSETPGSPAGSPTSTEEGTSTEPSEGSAPGTSTEPSEGSAPGSEPATSGSETPGTSESATPESGPGTSTEPSEGSAPR

SEQ ID NO: 218 - protein, 876 aa, synthetic construct
  REGION 1..876: note = Description of Artificial Sequence: Synthetic polypeptide
AGSPAGSPTSTEEGTSESATPESGPGTSTEPSEGSAPGSPAGSPTSTEEGTSTEPSEGSAPGTSTEPSEGSAPGTSESATPESGPGSEPATSGSETPGSEPATSGSETPGSPAGSPTSTEEGTSESATPESGPGTSTEPSEGSAPGTSTEPSEGSAPGSPAGSPTSTEEGTSTEPSEGSAPGTSTEPSEGSAPGTSESATPESGPGTSTEPSEGSAPGTSESATPESGPGSEPATSGSETPGTSTEPSEGSAPGTSTEPSEGSAPGTSESATPESGPGTSESATPESGPGSPAGSPTSTEEGTSESATPESGPGSEPATSGSETPGTSESATPESGPGTSTEPSEGSAPGTSTEPSEGSAPGTSTEPSEGSAPGTSTEPSEGSAPGTSTEPSEGSAPGTSTEPSEGSAPGSPAGSPTSTEEGTSTEPSEGSAPGGKPGGTSESATPESGPGSEPATSGSETPGTSESATPESGPGSEPATSGSETPGTSESATPESGPGTSTEPSEGSAPGTSESATPESGPGSPAGSPTSTEEGSPAGSPTSTEEGSPAGSPTSTEEGTSESATPESGPGTSTEPSEGSAPGTSESATPESGPGSEPATSGSETPGTSESATPESGPGSEPATSGSETPGTSESATPESGPGTSTEPSEGSAPGSPAGSPTSTEEGTSESATPESGPGSEPATSGSETPGTSESATPESGPGSPAGSPTSTEEGSPAGSPTSTEEGTSTEPSEGSAPGTSESATPESGPGTSESATPESGPGTSESATPESGPGSEPATSGSETPGSEPATSGSETPGSPAGSPTSTEEGTSTEPSEGSAPGTSTEPSEGSAPGSEPATSGSETPGTSESATPESGPGTSTEPSEGSAPGGKPGR

SEQ ID NO: 219 - protein, 888 aa, synthetic construct
  REGION 1..888: note = Description of Artificial Sequence: Synthetic polypeptide
AEATTAAGGAGSPAGSPTSTEEGTSESATPESGPGTSTEPSEGSAPGSPAGSPTSTEEGTSTEPSEGSAPGTSTEPSEGSAPGTSESATPESGPGSEPATSGSETPGSEPATSGSETPGSPAGSPTSTEEGTSESATPESGPGTSTEPSEGSAPGTSTEPSEGSAPGSPAGSPTSTEEGTSTEPSEGSAPGTSTEPSEGSAPGTSESATPESGPGTSTEPSEGSAPGTSESATPESGPGSEPATSGSETPGTSTEPSEGSAPGTSTEPSEGSAPGTSESATPESGPGTSESATPESGPGSPAGSPTSTEEGTSESATPESGPGSEPATSGSETPGTSESATPESGPGTSTEPSEGSAPGTSTEPSEGSAPGTSTEPSEGSAPGTSTEPSEGSAPGTSTEPSEGSAPGTSTEPSEGSAPGSPAGSPTSTEEGTSTEPSEGSAPTAEAAGCGTAEAAGTSESATPESGPGSEPATSGSETPGTSESATPESGPGSEPATSGSETPGTSESATPESGPGTSTEPSEGSAPGTSESATPESGPGSPAGSPTSTEEGSPAGSPTSTEEGSPAGSPTSTEEGTSESATPESGPGTSTEPSEGSAPGTSESATPESGPGSEPATSGSETPGTSESATPESGPGSEPATSGSETPGTSESATPESGPGTSTEPSEGSAPGSPAGSPTSTEEGTSESATPESGPGSEPATSGSETPGTSESATPESGPGSPAGSPTSTEEGSPAGSPTSTEEGTSTEPSEGSAPGTSESATPESGPGTSESATPESGPGTSESATPESGPGSEPATSGSETPGSEPATSGSETPGSPAGSPTSTEEGTSTEPSEGSAPGTSTEPSEGSAPGSEPATSGSETPGTSESATPESGPGTSTEPSEGSAPR

SEQ ID NO: 220 - protein, 901 aa, synthetic construct
  REGION 1..901: note = Description of Artificial Sequence: Synthetic polypeptide
AEATTAAGGATAEAAGCGTAEAAGSPAGSPTSTEEGTSESATPESGPGTSTEPSEGSAPGSPAGSPTSTEEGTSTEPSEGSAPGTSTEPSEGSAPGTSESATPESGPGSEPATSGSETPGSEPATSGSETPGSPAGSPTSTEEGTSESATPESGPGTSTEPSEGSAPGTSTEPSEGSAPGSPAGSPTSTEEGTSTEPSEGSAPGTSTEPSEGSAPGTSESATPESGPGTSTEPSEGSAPGTSESATPESGPGSEPATSGSETPGTSTEPSEGSAPGTSTEPSEGSAPGTSESATPESGPGTSESATPESGPGSPAGSPTSTEEGTSESATPESGPGSEPATSGSETPGTSESATPESGPGTSTEPSEGSAPGTSTEPSEGSAPGTSTEPSEGSAPGTSTEPSEGSAPGTSTEPSEGSAPGTSTEPSEGSAPGSPAGSPTSTEEGTSTEPSEGSAPGTSESATPESGPGSEPATSGSETPGTSESATPESGPGSEPATSGSETPGTSESATPESGPGTSTEPSEGSAPGTSESATPESGPGSPAGSPTSTEEGSPAGSPTSTEEGSPAGSPTSTEEGTSESATPESGPGTSTEPSEGSAPGTSESATPESGPGSEPATSGSETPGTSESATPESGPGSEPATSGSETPGTSESATPESGPGTSTEPSEGSAPGSPAGSPTSTEEGTSESATPESGPGSEPATSGSETPGTSESATPESGPGSPAGSPTSTEEGSPAGSPTSTEEGTSTEPSEGSAPGTSESATPESGPGTSESATPESGPGTSESATPESGPGSEPATSGSETPGSEPATSGSETPGSPAGSPTSTEEGTSTEPSEGSAPGTSTEPSEGSAPGSEPATSGSETPGTSESATPESGPGTSTEPSEGSAPTAEAAGCGTAEAAR

SEQ ID NO: 221 - protein, 914 aa, synthetic construct
  REGION 1..914: note = Description of Artificial Sequence: Synthetic polypeptide
AEATTAAGGATAEAAGCGTAEAAGSPAGSPTSTEEGTSESATPESGPGTSTEPSEGSAPGSPAGSPTSTEEGTSTEPSEGSAPGTSTEPSEGSAPGTSESATPESGPGSEPATSGSETPGSEPATSGSETPGSPAGSPTSTEEGTSESATPESGPGTSTEPSEGSAPGTSTEPSEGSAPGSPAGSPTSTEEGTSTEPSEGSAPGTSTEPSEGSAPGTSESATPESGPGTSTEPSEGSAPGTSESATPESGPGSEPATSGSETPGTSTEPSEGSAPGTSTEPSEGSAPGTSESATPESGPGTSESATPESGPGSPAGSPTSTEEGTSESATPESGPGSEPATSGSETPGTSESATPESGPGTSTEPSEGSAPGTSTEPSEGSAPGTSTEPSEGSAPGTSTEPSEGSAPGTSTEPSEGSAPGTSTEPSEGSAPGSPAGSPTSTEEGTSTEPSEGSAPTAEAAGCGTAEAAGTSESATPESGPGSEPATSGSETPGTSESATPESGPGSEPATSGSETPGTSESATPESGPGTSTEPSEGSAPGTSESATPESGPGSPAGSPTSTEEGSPAGSPTSTEEGSPAGSPTSTEEGTSESATPESGPGTSTEPSEGSAPGTSESATPESGPGSEPATSGSETPGTSESATPESGPGSEPATSGSETPGTSESATPESGPGTSTEPSEGSAPGSPAGSPTSTEEGTSESATPESGPGSEPATSGSETPGTSESATPESGPGSPAGSPTSTEEGSPAGSPTSTEEGTSTEPSEGSAPGTSESATPESGPGTSESATPESGPGTSESATPESGPGSEPATSGSETPGSEPATSGSETPGSPAGSPTSTEEGTSTEPSEGSAPGTSTEPSEGSAPGSEPATSGSETPGTSESATPESGPGTSTEPSEGSAPTAEAAGCGTAEAAR

SEQ ID NO: 222 - protein, 927 aa, synthetic construct
  REGION 1..927: note = Description of Artificial Sequence: Synthetic polypeptide
AEATTAAGGATAEAAGCGTAEAAGSPAGSPTSTEEGTSESATPESGPGTSTEPSEGSAPGSPAGSPTSTEEGTSTEPSEGSAPGTSTEPSEGSAPGTSESATPESGPGSEPATSGSETPGSEPATSGSETPGSPAGSPTSTEEGTSESATPESGPGTSTEPSEGSAPGTSTEPSEGSAPGSPAGSPTSTEEGTSTEPSEGSAPGTSTEPSEGSAPGTSESATPESGPGTSTEPSEGSAPGTSESATPESGPGSEPATSGSETPGTSTEPSEGSAPGTSTEPSEGSAPGTSESATPESGPGTSESATPESGPTAEAAGCGTAEAAGSPAGSPTSTEEGTSESATPESGPGSEPATSGSETPGTSESATPESGPGTSTEPSEGSAPGTSTEPSEGSAPGTSTEPSEGSAPGTSTEPSEGSAPGTSTEPSEGSAPGTSTEPSEGSAPGSPAGSPTSTEEGTSTEPSEGSAPGTSESATPESGPGSEPATSGSETPGTSESATPESGPGSEPATSGSETPGTSESATPESGPGTSTEPSEGSAPGTSESATPESGPGSPAGSPTSTEEGSPAGSPTSTEEGSPAGSPTSTEEGTSESATPESGPGTSTEPSEGSAPTAEAAGCGTAEAAGTSESATPESGPGSEPATSGSETPGTSESATPESGPGSEPATSGSETPGTSESATPESGPGTSTEPSEGSAPGSPAGSPTSTEEGTSESATPESGPGSEPATSGSETPGTSESATPESGPGSPAGSPTSTEEGSPAGSPTSTEEGTSTEPSEGSAPGTSESATPESGPGTSESATPESGPGTSESATPESGPGSEPATSGSETPGSEPATSGSETPGSPAGSPTSTEEGTSTEPSEGSAPGTSTEPSEGSAPGSEPATSGSETPGTSESATPESGPGTSTEPSEGSAPTAEAAGCGTAEAAR

SEQ ID NO: 223 - protein, 890 aa, synthetic construct
  REGION 1..890: note = Description of Artificial Sequence: Synthetic polypeptide
ATGTATSEGSPEGSPAGSPTSTEEGTSESATPESGPGTSTEPSEGSAPGSPAGSPTSTEEGTSTEPSEGSAPGTSTEPSEGSAPGTSESATPESGPGSEPATSGSETPGSEPATSGSETPGSPAGSPTSTEEGTSESATPESGPGTSTEPSEGSAPGTSTEPSEGSAPGSPAGSPTSTEEGTSTEPSEGSAPGTSTEPSEGSAPGTSESATPESGPGTSTEPSEGSAPGTSESATPESGPGSEPATSGSETPGTSTEPSEGSAPGTSTEPSEGSAPGTSESATPESGPGTSESATPESGPGSPAGSPTSTEEGTSESATPESGPGSEPATSGSETPGTSESATPESGPGTSTEPSEGSAPGTSTEPSEGSAPGTSTEPSEGSAPGTSTEPSEGSAPGTSTEPSEGSAPGTSTEPSEGSAPGSPAGSPTSTEEGTSTEPSEGSAPTAEAAGCGTAEAAGTSESATPESGPGSEPATSGSETPGTSESATPESGPGSEPATSGSETPGTSESATPESGPGTSTEPSEGSAPGTSESATPESGPGSPAGSPTSTEEGSPAGSPTSTEEGSPAGSPTSTEEGTSESATPESGPGTSTEPSEGSAPGTSESATPESGPGSEPATSGSETPGTSESATPESGPGSEPATSGSETPGTSESATPESGPGTSTEPSEGSAPGSPAGSPTSTEEGTSESATPESGPGSEPATSGSETPGTSESATPESGPGSPAGSPTSTEEGSPAGSPTSTEEGTSTEPSEGSAPGTSESATPESGPGTSESATPESGPGTSESATPESGPGSEPATSGSETPGSEPATSGSETPGSPAGSPTSTEEGTSTEPSEGSAPGTSTEPSEGSAPGSEPATSGSETPGTSESATPESGPGTSTEPSEGSAPR

SEQ ID NO: 224 - protein, 903 aa, synthetic construct
  REGION 1..903: note = Description of Artificial Sequence: Synthetic polypeptide
ATGTATSEGSPETAEAAGCGTAEAAGSPAGSPTSTEEGTSESATPESGPGTSTEPSEGSAPGSPAGSPTSTEEGTSTEPSEGSAPGTSTEPSEGSAPGTSESATPESGPGSEPATSGSETPGSEPATSGSETPGSPAGSPTSTEEGTSESATPESGPGTSTEPSEGSAPGTSTEPSEGSAPGSPAGSPTSTEEGTSTEPSEGSAPGTSTEPSEGSAPGTSESATPESGPGTSTEPSEGSAPGTSESATPESGPGSEPATSGSETPGTSTEPSEGSAPGTSTEPSEGSAPGTSESATPESGPGTSESATPESGPGSPAGSPTSTEEGTSESATPESGPGSEPATSGSETPGTSESATPESGPGTSTEPSEGSAPGTSTEPSEGSAPGTSTEPSEGSAPGTSTEPSEGSAPGTSTEPSEGSAPGTSTEPSEGSAPGSPAGSPTSTEEGTSTEPSEGSAPGTSESATPESGPGSEPATSGSETPGTSESATPESGPGSEPATSGSETPGTSESATPESGPGTSTEPSEGSAPGTSESATPESGPGSPAGSPTSTEEGSPAGSPTSTEEGSPAGSPTSTEEGTSESATPESGPGTSTEPSEGSAPGTSESATPESGPGSEPATSGSETPGTSESATPESGPGSEPATSGSETPGTSESATPESGPGTSTEPSEGSAPGSPAGSPTSTEEGTSESATPESGPGSEPATSGSETPGTSESATPESGPGSPAGSPTSTEEGSPAGSPTSTEEGTSTEPSEGSAPGTSESATPESGPGTSESATPESGPGTSESATPESGPGSEPATSGSETPGSEPATSGSETPGSPAGSPTSTEEGTSTEPSEGSAPGTSTEPSEGSAPGSEPATSGSETPGTSESATPESGPGTSTEPSEGSAPTAEAAGCGTAEAAR

SEQ ID NO: 225 - protein, 916 aa, synthetic construct
  REGION 1..916: note = Description of Artificial Sequence: Synthetic polypeptide
ATGTATSEGSPETAEAAGCGTAEAAGSPAGSPTSTEEGTSESATPESGPGTSTEPSEGSAPGSPAGSPTSTEEGTSTEPSEGSAPGTSTEPSEGSAPGTSESATPESGPGSEPATSGSETPGSEPATSGSETPGSPAGSPTSTEEGTSESATPESGPGTSTEPSEGSAPGTSTEPSEGSAPGSPAGSPTSTEEGTSTEPSEGSAPGTSTEPSEGSAPGTSESATPESGPGTSTEPSEGSAPGTSESATPESGPGSEPATSGSETPGTSTEPSEGSAPGTSTEPSEGSAPGTSESATPESGPGTSESATPESGPGSPAGSPTSTEEGTSESATPESGPGSEPATSGSETPGTSESATPESGPGTSTEPSEGSAPGTSTEPSEGSAPGTSTEPSEGSAPGTSTEPSEGSAPGTSTEPSEGSAPGTSTEPSEGSAPGSPAGSPTSTEEGTSTEPSEGSAPTAEAAGCGTAEAAGTSESATPESGPGSEPATSGSETPGTSESATPESGPGSEPATSGSETPGTSESATPESGPGTSTEPSEGSAPGTSESATPESGPGSPAGSPTSTEEGSPAGSPTSTEEGSPAGSPTSTEEGTSESATPESGPGTSTEPSEGSAPGTSESATPESGPGSEPATSGSETPGTSESATPESGPGSEPATSGSETPGTSESATPESGPGTSTEPSEGSAPGSPAGSPTSTEEGTSESATPESGPGSEPATSGSETPGTSESATPESGPGSPAGSPTSTEEGSPAGSPTSTEEGTSTEPSEGSAPGTSESATPESGPGTSESATPESGPGTSESATPESGPGSEPATSGSETPGSEPATSGSETPGSPAGSPTSTEEGTSTEPSEGSAPGTSTEPSEGSAPGSEPATSGSETPGTSESATPESGPGTSTEPSEGSAPTAEAAGCGTAEAAR

SEQ ID NO: 226 - protein, 929 aa, synthetic construct
  REGION 1..929: note = Description of Artificial Sequence: Synthetic polypeptide
ATGTATSEGSPETAEAAGCGTAEAAGSPAGSPTSTEEGTSESATPESGPGTSTEPSEGSAPGSPAGSPTSTEEGTSTEPSEGSAPGTSTEPSEGSAPGTSESATPESGPGSEPATSGSETPGSEPATSGSETPGSPAGSPTSTEEGTSESATPESGPGTSTEPSEGSAPGTSTEPSEGSAPGSPAGSPTSTEEGTSTEPSEGSAPGTSTEPSEGSAPGTSESATPESGPGTSTEPSEGSAPGTSESATPESGPGSEPATSGSETPGTSTEPSEGSAPGTSTEPSEGSAPGTSESATPESGPGTSESATPESGPTAEAAGCGTAEAAGSPAGSPTSTEEGTSESATPESGPGSEPATSGSETPGTSESATPESGPGTSTEPSEGSAPGTSTEPSEGSAPGTSTEPSEGSAPGTSTEPSEGSAPGTSTEPSEGSAPGTSTEPSEGSAPGSPAGSPTSTEEGTSTEPSEGSAPGTSESATPESGPGSEPATSGSETPGTSESATPESGPGSEPATSGSETPGTSESATPESGPGTSTEPSEGSAPGTSESATPESGPGSPAGSPTSTEEGSPAGSPTSTEEGSPAGSPTSTEEGTSESATPESGPGTSTEPSEGSAPTAEAAGCGTAEAAGTSESATPESGPGSEPATSGSETPGTSESATPESGPGSEPATSGSETPGTSESATPESGPGTSTEPSEGSAPGSPAGSPTSTEEGTSESATPESGPGSEPATSGSETPGTSESATPESGPGSPAGSPTSTEEGSPAGSPTSTEEGTSTEPSEGSAPGTSESATPESGPGTSESATPESGPGTSESATPESGPGSEPATSGSETPGSEPATSGSETPGSPAGSPTSTEEGTSTEPSEGSAPGTSTEPSEGSAPGSEPATSGSETPGTSESATPESGPGTSTEPSEGSAPTAEAAGCGTAEAAR

SEQ ID NO: 227 - protein, 890 aa, synthetic construct
  REGION 1..890: note = Description of Artificial Sequence: Synthetic polypeptide
EPTAATTGESAGGSPAGSPTSTEEGTSESATPESGPGTSTEPSEGSAPGSPAGSPTSTEEGTSTEPSEGSAPGTSTEPSEGSAPGTSESATPESGPGSEPATSGSETPGSEPATSGSETPGSPAGSPTSTEEGTSESATPESGPGTSTEPSEGSAPGTSTEPSEGSAPGSPAGSPTSTEEGTSTEPSEGSAPGTSTEPSEGSAPGTSESATPESGPGTSTEPSEGSAPGTSESATPESGPGSEPATSGSETPGTSTEPSEGSAPGTSTEPSEGSAPGTSESATPESGPGTSESATPESGPGSPAGSPTSTEEGTSESATPESGPGSEPATSGSETPGTSESATPESGPGTSTEPSEGSAPGTSTEPSEGSAPGTSTEPSEGSAPGTSTEPSEGSAPGTSTEPSEGSAPGTSTEPSEGSAPGSPAGSPTSTEEGTSTEPSEGSAPTAEAAGCGTAEAAGTSESATPESGPGSEPATSGSETPGTSESATPESGPGSEPATSGSETPGTSESATPESGPGTSTEPSEGSAPGTSESATPESGPGSPAGSPTSTEEGSPAGSPTSTEEGSPAGSPTSTEEGTSESATPESGPGTSTEPSEGSAPGTSESATPESGPGSEPATSGSETPGTSESATPESGPGSEPATSGSETPGTSESATPESGPGTSTEPSEGSAPGSPAGSPTSTEEGTSESATPESGPGSEPATSGSETPGTSESATPESGPGSPAGSPTSTEEGSPAGSPTSTEEGTSTEPSEGSAPGTSESATPESGPGTSESATPESGPGTSESATPESGPGSEPATSGSETPGSEPATSGSETPGSPAGSPTSTEEGTSTEPSEGSAPGTSTEPSEGSAPGSEPATSGSETPGTSESATPESGPGTSTEPSEGSAPR

SEQ ID NO: 228 - protein, 903 aa, synthetic construct
  REGION 1..903: note = Description of Artificial Sequence: Synthetic polypeptide
EPTAATTGESAGTAEAAGCGTAEAAGSPAGSPTSTEEGTSESATPESGPGTSTEPSEGSAPGSPAGSPTSTEEGTSTEPSEGSAPGTSTEPSEGSAPGTSESATPESGPGSEPATSGSETPGSEPATSGSETPGSPAGSPTSTEEGTSESATPESGPGTSTEPSEGSAPGTSTEPSEGSAPGSPAGSPTSTEEGTSTEPSEGSAPGTSTEPSEGSAPGTSESATPESGPGTSTEPSEGSAPGTSESATPESGPGSEPATSGSETPGTSTEPSEGSAPGTSTEPSEGSAPGTSESATPESGPGTSESATPESGPGSPAGSPTSTEEGTSESATPESGPGSEPATSGSETPGTSESATPESGPGTSTEPSEGSAPGTSTEPSEGSAPGTSTEPSEGSAPGTSTEPSEGSAPGTSTEPSEGSAPGTSTEPSEGSAPGSPAGSPTSTEEGTSTEPSEGSAPGTSESATPESGPGSEPATSGSETPGTSESATPESGPGSEPATSGSETPGTSESATPESGPGTSTEPSEGSAPGTSESATPESGPGSPAGSPTSTEEGSPAGSPTSTEEGSPAGSPTSTEEGTSESATPESGPGTSTEPSEGSAPGTSESATPESGPGSEPATSGSETPGTSESATPESGPGSEPATSGSETPGTSESATPESGPGTSTEPSEGSAPGSPAGSPTSTEEGTSESATPESGPGSEPATSGSETPGTSESATPESGPGSPAGSPTSTEEGSPAGSPTSTEEGTSTEPSEGSAPGTSESATPESGPGTSESATPESGPGTSESATPESGPGSEPATSGSETPGSEPATSGSETPGSPAGSPTSTEEGTSTEPSEGSAPGTSTEPSEGSAPGSEPATSGSETPGTSESATPESGPGTSTEPSEGSAPTAEAAGCGTAEAAR

SEQ ID NO: 229 - protein, 916 aa, synthetic construct
  REGION 1..916: note = Description of Artificial Sequence: Synthetic polypeptide
EPTAATTGESAGTAEAAGCGTAEAAGSPAGSPTSTEEGTSESATPESGPGTSTEPSEGSAPGSPAGSPTSTEEGTSTEPSEGSAPGTSTEPSEGSAPGTSESATPESGPGSEPATSGSETPGSEPATSGSETPGSPAGSPTSTEEGTSESATPESGPGTSTEPSEGSAPGTSTEPSEGSAPGSPAGSPTSTEEGTSTEPSEGSAPGTSTEPSEGSAPGTSESATPESGPGTSTEPSEGSAPGTSESATPESGPGSEPATSGSETPGTSTEPSEGSAPGTSTEPSEGSAPGTSESATPESGPGTSESATPESGPGSPAGSPTSTEEGTSESATPESGPGSEPATSGSETPGTSESATPESGPGTSTEPSEGSAPGTSTEPSEGSAPGTSTEPSEGSAPGTSTEPSEGSAPGTSTEPSEGSAPGTSTEPSEGSAPGSPAGSPTSTEEGTSTEPSEGSAPTAEAAGCGTAEAAGTSESATPESGPGSEPATSGSETPGTSESATPESGPGSEPATSGSETPGTSESATPESGPGTSTEPSEGSAPGTSESATPESGPGSPAGSPTSTEEGSPAGSPTSTEEGSPAGSPTSTEEGTSESATPESGPGTSTEPSEGSAPGTSESATPESGPGSEPATSGSETPGTSESATPESGPGSEPATSGSETPGTSESATPESGPGTSTEPSEGSAPGSPAGSPTSTEEGTSESATPESGPGSEPATSGSETPGTSESATPESGPGSPAGSPTSTEEGSPAGSPTSTEEGTSTEPSEGSAPGTSESATPESGPGTSESATPESGPGTSESATPESGPGSEPATSGSETPGSEPATSGSETPGSPAGSPTSTEEGTSTEPSEGSAPGTSTEPSEGSAPGSEPATSGSETPGTSESATPESGPGTSTEPSEGSAPTAEAAGCGTAEAAR

SEQ ID NO: 230 - protein, 929 aa, synthetic construct
  REGION 1..929: note = Description of Artificial Sequence: Synthetic polypeptide
EPTAATTGESAGTAEAAGCGTAEAAGSPAGSPTSTEEGTSESATPESGPGTSTEPSEGSAPGSPAGSPTSTEEGTSTEPSEGSAPGTSTEPSEGSAPGTSESATPESGPGSEPATSGSETPGSEPATSGSETPGSPAGSPTSTEEGTSESATPESGPGTSTEPSEGSAPGTSTEPSEGSAPGSPAGSPTSTEEGTSTEPSEGSAPGTSTEPSEGSAPGTSESATPESGPGTSTEPSEGSAPGTSESATPESGPGSEPATSGSETPGTSTEPSEGSAPGTSTEPSEGSAPGTSESATPESGPGTSESATPESGPTAEAAGCGTAEAAGSPAGSPTSTEEGTSESATPESGPGSEPATSGSETPGTSESATPESGPGTSTEPSEGSAPGTSTEPSEGSAPGTSTEPSEGSAPGTSTEPSEGSAPGTSTEPSEGSAPGTSTEPSEGSAPGSPAGSPTSTEEGTSTEPSEGSAPGTSESATPESGPGSEPATSGSETPGTSESATPESGPGSEPATSGSETPGTSESATPESGPGTSTEPSEGSAPGTSESATPESGPGSPAGSPTSTEEGSPAGSPTSTEEGSPAGSPTSTEEGTSESATPESGPGTSTEPSEGSAPTAEAAGCGTAEAAGTSESATPESGPGSEPATSGSETPGTSESATPESGPGSEPATSGSETPGTSESATPESGPGTSTEPSEGSAPGSPAGSPTSTEEGTSESATPESGPGSEPATSGSETPGTSESATPESGPGSPAGSPTSTEEGSPAGSPTSTEEGTSTEPSEGSAPGTSESATPESGPGTSESATPESGPGTSESATPESGPGSEPATSGSETPGSEPATSGSETPGSPAGSPTSTEEGTSTEPSEGSAPGTSTEPSEGSAPGSEPATSGSETPGTSESATPESGPGTSTEPSEGSAPTAEAAGCGTAEAAR

SEQ ID NO: 231 - protein, 891 aa, synthetic construct
  REGION 1..891: note = Description of Artificial Sequence: Synthetic polypeptide
AEATTAAGGAEEEGSPAGSPTSTEEGTSESATPESGPGTSTEPSEGSAPGSPAGSPTSTEEGTSTEPSEGSAPGTSTEPSEGSAPGTSESATPESGPGSEPATSGSETPGSEPATSGSETPGSPAGSPTSTEEGTSESATPESGPGTSTEPSEGSAPGTSTEPSEGSAPGSPAGSPTSTEEGTSTEPSEGSAPGTSTEPSEGSAPGTSESATPESGPGTSTEPSEGSAPGTSESATPESGPGSEPATSGSETPGTSTEPSEGSAPGTSTEPSEGSAPGTSESATPESGPGTSESATPESGPGSPAGSPTSTEEGTSESATPESGPGSEPATSGSETPGTSESATPESGPGTSTEPSEGSAPGTSTEPSEGSAPGTSTEPSEGSAPGTSTEPSEGSAPGTSTEPSEGSAPGTSTEPSEGSAPGSPAGSPTSTEEGTSTEPSEGSAPTAEAAGCGTAEAAGTSESATPESGPGSEPATSGSETPGTSESATPESGPGSEPATSGSETPGTSESATPESGPGTSTEPSEGSAPGTSESATPESGPGSPAGSPTSTEEGSPAGSPTSTEEGSPAGSPTSTEEGTSESATPESGPGTSTEPSEGSAPGTSESATPESGPGSEPATSGSETPGTSESATPESGPGSEPATSGSETPGTSESATPESGPGTSTEPSEGSAPGSPAGSPTSTEEGTSESATPESGPGSEPATSGSETPGTSESATPESGPGSPAGSPTSTEEGSPAGSPTSTEEGTSTEPSEGSAPGTSESATPESGPGTSESATPESGPGTSESATPESGPGSEPATSGSETPGSEPATSGSETPGSPAGSPTSTEEGTSTEPSEGSAPGTSTEPSEGSAPGSEPATSGSETPGTSESATPESGPGTSTEPSEGSAPR

SEQ ID NO: 232 - protein, 904 aa, synthetic construct
  REGION 1..904: note = Description of Artificial Sequence: Synthetic polypeptide
AEATTAAGGAEEETAEAAGCGTAEAAGSPAGSPTSTEEGTSESATPESGPGTSTEPSEGSAPGSPAGSPTSTEEGTSTEPSEGSAPGTSTEPSEGSAPGTSESATPESGPGSEPATSGSETPGSEPATSGSETPGSPAGSPTSTEEGTSESATPESGPGTSTEPSEGSAPGTSTEPSEGSAPGSPAGSPTSTEEGTSTEPSEGSAPGTSTEPSEGSAPGTSESATPESGPGTSTEPSEGSAPGTSESATPESGPGSEPATSGSETPGTSTEPSEGSAPGTSTEPSEGSAPGTSESATPESGPGTSESATPESGPGSPAGSPTSTEEGTSESATPESGPGSEPATSGSETPGTSESATPESGPGTSTEPSEGSAPGTSTEPSEGSAPGTSTEPSEGSAPGTSTEPSEGSAPGTSTEPSEGSAPGTSTEPSEGSAPGSPAGSPTSTEEGTSTEPSEGSAPGTSESATPESGPGSEPATSGSETPGTSESATPESGPGSEPATSGSETPGTSESATPESGPGTSTEPSEGSAPGTSESATPESGPGSPAGSPTSTEEGSPAGSPTSTEEGSPAGSPTSTEEGTSESATPESGPGTSTEPSEGSAPGTSESATPESGPGSEPATSGSETPGTSESATPESGPGSEPATSGSETPGTSESATPESGPGTSTEPSEGSAPGSPAGSPTSTEEGTSESATPESGPGSEPATSGSETPGTSESATPESGPGSPAGSPTSTEEGSPAGSPTSTEEGTSTEPSEGSAPGTSESATPESGPGTSESATPESGPGTSESATPESGPGSEPATSGSETPGSEPATSGSETPGSPAGSPTSTEEGTSTEPSEGSAPGTSTEPSEGSAPGSEPATSGSETPGTSESATPESGPGTSTEPSEGSAPTAEAAGCGTAEAAR

SEQ ID NO: 233 - protein, 917 aa, synthetic construct
  REGION 1..917: note = Description of Artificial Sequence: Synthetic polypeptide
AEATTAAGGAEEETAEAAGCGTAEAAGSPAGSPTSTEEGTSESATPESGPGTSTEPSEGSAPGSPAGSPTSTEEGTSTEPSEGSAPGTSTEPSEGSAPGTSESATPESGPGSEPATSGSETPGSEPATSGSETPGSPAGSPTSTEEGTSESATPESGPGTSTEPSEGSAPGTSTEPSEGSAPGSPAGSPTSTEEGTSTEPSEGSAPGTSTEPSEGSAPGTSESATPESGPGTSTEPSEGSAPGTSESATPESGPGSEPATSGSETPGTSTEPSEGSAPGTSTEPSEGSAPGTSESATPESGPGTSESATPESGPGSPAGSPTSTEEGTSESATPESGPGSEPATSGSETPGTSESATPESGPGTSTEPSEGSAPGTSTEPSEGSAPGTSTEPSEGSAPGTSTEPSEGSAPGTSTEPSEGSAPGTSTEPSEGSAPGSPAGSPTSTEEGTSTEPSEGSAPTAEAAGCGTAEAAGTSESATPESGPGSEPATSGSETPGTSESATPESGPGSEPATSGSETPGTSESATPESGPGTSTEPSEGSAPGTSESATPESGPGSPAGSPTSTEEGSPAGSPTSTEEGSPAGSPTSTEEGTSESATPESGPGTSTEPSEGSAPGTSESATPESGPGSEPATSGSETPGTSESATPESGPGSEPATSGSETPGTSESATPESGPGTSTEPSEGSAPGSPAGSPTSTEEGTSESATPESGPGSEPATSGSETPGTSESATPESGPGSPAGSPTSTEEGSPAGSPTSTEEGTSTEPSEGSAPGTSESATPESGPGTSESATPESGPGTSESATPESGPGSEPATSGSETPGSEPATSGSETPGSPAGSPTSTEEGTSTEPSEGSAPGTSTEPSEGSAPGSEPATSGSETPGTSESATPESGPGTSTEPSEGSAPTAEAAGCGTAEAAR

SEQ ID NO: 234 - protein, 930 aa, synthetic construct
  REGION 1..930: note = Description of Artificial Sequence: Synthetic polypeptide
AEATTAAGGAEEETAEAAGCGTAEAAGSPAGSPTSTEEGTSESATPESGPGTSTEPSEGSAPGSPAGSPTSTEEGTSTEPSEGSAPGTSTEPSEGSAPGTSESATPESGPGSEPATSGSETPGSEPATSGSETPGSPAGSPTSTEEGTSESATPESGPGTSTEPSEGSAPGTSTEPSEGSAPGSPAGSPTSTEEGTSTEPSEGSAPGTSTEPSEGSAPGTSESATPESGPGTSTEPSEGSAPGTSESATPESGPGSEPATSGSETPGTSTEPSEGSAPGTSTEPSEGSAPGTSESATPESGPGTSESATPESGPTAEAAGCGTAEAAGSPAGSPTSTEEGTSESATPESGPGSEPATSGSETPGTSESATPESGPGTSTEPSEGSAPGTSTEPSEGSAPGTSTEPSEGSAPGTSTEPSEGSAPGTSTEPSEGSAPGTSTEPSEGSAPGSPAGSPTSTEEGTSTEPSEGSAPGTSESATPESGPGSEPATSGSETPGTSESATPESGPGSEPATSGSETPGTSESATPESGPGTSTEPSEGSAPGTSESATPESGPGSPAGSPTSTEEGSPAGSPTSTEEGSPAGSPTSTEEGTSESATPESGPGTSTEPSEGSAPTAEAAGCGTAEAAGTSESATPESGPGSEPATSGSETPGTSESATPESGPGSEPATSGSETPGTSESATPESGPGTSTEPSEGSAPGSPAGSPTSTEEGTSESATPESGPGSEPATSGSETPGTSESATPESGPGSPAGSPTSTEEGSPAGSPTSTEEGTSTEPSEGSAPGTSESATPESGPGTSESATPESGPGTSESATPESGPGSEPATSGSETPGSEPATSGSETPGSPAGSPTSTEEGTSTEPSEGSAPGTSTEPSEGSAPGSEPATSGSETPGTSESATPESGPGTSTEPSEGSAPTAEAAGCGTAEAAR

SEQ ID NO: 235 - protein, 893 aa, synthetic construct
  REGION 1..893: note = Description of Artificial Sequence: Synthetic polypeptide
ATGTATSEGSPEEEEGSPAGSPTSTEEGTSESATPESGPGTSTEPSEGSAPGSPAGSPTSTEEGTSTEPSEGSAPGTSTEPSEGSAPGTSESATPESGPGSEPATSGSETPGSEPATSGSETPGSPAGSPTSTEEGTSESATPESGPGTSTEPSEGSAPGTSTEPSEGSAPGSPAGSPTSTEEGTSTEPSEGSAPGTSTEPSEGSAPGTSESATPESGPGTSTEPSEGSAPGTSESATPESGPGSEPATSGSETPGTSTEPSEGSAPGTSTEPSEGSAPGTSESATPESGPGTSESATPESGPGSPAGSPTSTEEGTSESATPESGPGSEPATSGSETPGTSESATPESGPGTSTEPSEGSAPGTSTEPSEGSAPGTSTEPSEGSAPGTSTEPSEGSAPGTSTEPSEGSAPGTSTEPSEGSAPGSPAGSPTSTEEGTSTEPSEGSAPTAEAAGCGTAEAAGTSESATPESGPGSEPATSGSETPGTSESATPESGPGSEPATSGSETPGTSESATPESGPGTSTEPSEGSAPGTSESATPESGPGSPAGSPTSTEEGSPAGSPTSTEEGSPAGSPTSTEEGTSESATPESGPGTSTEPSEGSAPGTSESATPESGPGSEPATSGSETPGTSESATPESGPGSEPATSGSETPGTSESATPESGPGTSTEPSEGSAPGSPAGSPTSTEEGTSESATPESGPGSEPATSGSETPGTSESATPESGPGSPAGSPTSTEEGSPAGSPTSTEEGTSTEPSEGSAPGTSESATPESGPGTSESATPESGPGTSESATPESGPGSEPATSGSETPGSEPATSGSETPGSPAGSPTSTEEGTSTEPSEGSAPGTSTEPSEGSAPGSEPATSGSETPGTSESATPESGPGTSTEPSEGSAPR

SEQ ID NO: 236 - protein, 906 aa, synthetic construct
  REGION 1..906: note = Description of Artificial Sequence: Synthetic polypeptide
ATGTATSEGSPEEEETAEAAGCGTAEAAGSPAGSPTSTEEGTSESATPESGPGTSTEPSEGSAPGSPAGSPTSTEEGTSTEPSEGSAPGTSTEPSEGSAPGTSESATPESGPGSEPATSGSETPGSEPATSGSETPGSPAGSPTSTEEGTSESATPESGPGTSTEPSEGSAPGTSTEPSEGSAPGSPAGSPTSTEEGTSTEPSEGSAPGTSTEPSEGSAPGTSESATPESGPGTSTEPSEGSAPGTSESATPESGPGSEPATSGSETPGTSTEPSEGSAPGTSTEPSEGSAPGTSESATPESGPGTSESATPESGPGSPAGSPTSTEEGTSESATPESGPGSEPATSGSETPGTSESATPESGPGTSTEPSEGSAPGTSTEPSEGSAPGTSTEPSEGSAPGTSTEPSEGSAPGTSTEPSEGSAPGTSTEPSEGSAPGSPAGSPTSTEEGTSTEPSEGSAPGTSESATPESGPGSEPATSGSETPGTSESATPESGPGSEPATSGSETPGTSESATPESGPGTSTEPSEGSAPGTSESATPESGPGSPAGSPTSTEEGSPAGSPTSTEEGSPAGSPTSTEEGTSESATPESGPGTSTEPSEGSAPGTSESATPESGPGSEPATSGSETPGTSESATPESGPGSEPATSGSETPGTSESATPESGPGTSTEPSEGSAPGSPAGSPTSTEEGTSESATPESGPGSEPATSGSETPGTSESATPESGPGSPAGSPTSTEEGSPAGSPTSTEEGTSTEPSEGSAPGTSESATPESGPGTSESATPESGPGTSESATPESGPGSEPATSGSETPGSEPATSGSETPGSPAGSPTSTEEGTSTEPSEGSAPGTSTEPSEGSAPGSEPATSGSETPGTSESATPESGPGTSTEPSEGSAPTAEAAGCGTAEAAR

SEQ ID NO: 237 - protein, 919 aa, synthetic construct
  REGION 1..919: note = Description of Artificial Sequence: Synthetic polypeptide
ATGTATSEGSPEEEETAEAAGCGTAEAAGSPAGSPTSTEEGTSESATPESGPGTSTEPSEGSAPGSPAGSPTSTEEGTSTEPSEGSAPGTSTEPSEGSAPGTSESATPESGPGSEPATSGSETPGSEPATSGSETPGSPAGSPTSTEEGTSESATPESGPGTSTEPSEGSAPGTSTEPSEGSAPGSPAGSPTSTEEGTSTEPSEGSAPGTSTEPSEGSAPGTSESATPESGPGTSTEPSEGSAPGTSESATPESGPGSEPATSGSETPGTSTEPSEGSAPGTSTEPSEGSAPGTSESATPESGPGTSESATPESGPGSPAGSPTSTEEGTSESATPESGPGSEPATSGSETPGTSESATPESGPGTSTEPSEGSAPGTSTEPSEGSAPGTSTEPSEGSAPGTSTEPSEGSAPGTSTEPSEGSAPGTSTEPSEGSAPGSPAGSPTSTEEGTSTEPSEGSAPTAEAAGCGTAEAAGTSESATPESGPGSEPATSGSETPGTSESATPESGPGSEPATSGSETPGTSESATPESGPGTSTEPSEGSAPGTSESATPESGPGSPAGSPTSTEEGSPAGSPTSTEEGSPAGSPTSTEEGTSESATPESGPGTSTEPSEGSAPGTSESATPESGPGSEPATSGSETPGTSESATPESGPGSEPATSGSETPGTSESATPESGPGTSTEPSEGSAPGSPAGSPTSTEEGTSESATPESGPGSEPATSGSETPGTSESATPESGPGSPAGSPTSTEEGSPAGSPTSTEEGTSTEPSEGSAPGTSESATPESGPGTSESATPESGPGTSESATPESGPGSEPATSGSETPGSEPATSGSETPGSPAGSPTSTEEGTSTEPSEGSAPGTSTEPSEGSAPGSEPATSGSETPGTSESATPESGPGTSTEPSEGSAPTAEAAGCGTAEAAR

SEQ ID NO: 238 - protein, 932 aa, synthetic construct
  REGION 1..932: note = Description of Artificial Sequence: Synthetic polypeptide
ATGTATSEGSPEEEETAEAAGCGTAEAAGSPAGSPTSTEEGTSESATPESGPGTSTEPSEGSAPGSPAGSPTSTEEGTSTEPSEGSAPGTSTEPSEGSAPGTSESATPESGPGSEPATSGSETPGSEPATSGSETPGSPAGSPTSTEEGTSESATPESGPGTSTEPSEGSAPGTSTEPSEGSAPGSPAGSPTSTEEGTSTEPSEGSAPGTSTEPSEGSAPGTSESATPESGPGTSTEPSEGSAPGTSESATPESGPGSEPATSGSETPGTSTEPSEGSAPGTSTEPSEGSAPGTSESATPESGPGTSESATPESGPTAEAAGCGTAEAAGSPAGSPTSTEEGTSESATPESGPGSEPATSGSETPGTSESATPESGPGTSTEPSEGSAPGTSTEPSEGSAPGTSTEPSEGSAPGTSTEPSEGSAPGTSTEPSEGSAPGTSTEPSEGSAPGSPAGSPTSTEEGTSTEPSEGSAPGTSESATPESGPGSEPATSGSETPGTSESATPESGPGSEPATSGSETPGTSESATPESGPGTSTEPSEGSAPGTSESATPESGPGSPAGSPTSTEEGSPAGSPTSTEEGSPAGSPTSTEEGTSESATPESGPGTSTEPSEGSAPTAEAAGCGTAEAAGTSESATPESGPGSEPATSGSETPGTSESATPESGPGSEPATSGSETPGTSESATPESGPGTSTEPSEGSAPGSPAGSPTSTEEGTSESATPESGPGSEPATSGSETPGTSESATPESGPGSPAGSPTSTEEGSPAGSPTSTEEGTSTEPSEGSAPGTSESATPESGPGTSESATPESGPGTSESATPESGPGSEPATSGSETPGSEPATSGSETPGSPAGSPTSTEEGTSTEPSEGSAPGTSTEPSEGSAPGSEPATSGSETPGTSESATPESGPGTSTEPSEGSAPTAEAAGCGTAEAAR

SEQ ID NO: 239 - protein, 898 aa, synthetic construct
  REGION 1..898: note = Description of Artificial Sequence: Synthetic polypeptide
AEATTAAGGAEEEGSPAGSPTSTEEGTSESATPESGPGTSTEPSEGSAPGSPAGSPTSTEEGTSTEPSEGSAPGTSTEPSEGSAPGTSESATPESGPGSEPATSGSETPGSEPATSGSETPGSPAGSPTSTEEGTSESATPESGPGTSTEPSEGSAPGTSTEPSEGSAPGSPAGSPTSTEEGTSTEPSEGSAPGTSTEPSEGSAPGTSESATPESGPGTSTEPSEGSAPGTSESATPESGPGSEPATSGSETPGTSTEPSEGSAPGTSTEPSEGSAPGTSESATPESGPGTSESATPESGPGSPAGSPTSTEEGTSESATPESGPGSEPATSGSETPGTSESATPESGPGTSTEPSEGSAPGTSTEPSEGSAPGTSTEPSEGSAPGTSTEPSEGSAPGTSTEPSEGSAPGTSTEPSEGSAPGSPAGSPTSTEEGTSTEPSEGSAPTAEAAGCGTAEAAGTSESATPESGPGSEPATSGSETPGTSESATPESGPGSEPATSGSETPGTSESATPESGPGTSTEPSEGSAPGTSESATPESGPGSPAGSPTSTEEGSPAGSPTSTEEGSPAGSPTSTEEGTSESATPESGPGTSTEPSEGSAPGTSESATPESGPGSEPATSGSETPGTSESATPESGPGSEPATSGSETPGTSESATPESGPGTSTEPSEGSAPGSPAGSPTSTEEGTSESATPESGPGSEPATSGSETPGTSESATPESGPGSPAGSPTSTEEGSPAGSPTSTEEGTSTEPSEGSAPGTSESATPESGPGTSESATPESGPGTSESATPESGPGSEPATSGSETPGSEPATSGSETPGSPAGSPTSTEEGTSTEPSEGSAPGTSTEPSEGSAPGSEPATSGSETPGTSESATPESGPGTSTEPSEGSAPRPRPRPRP

SEQ ID NO: 240 - protein, 911 aa, synthetic construct
  REGION 1..911: note = Description of Artificial Sequence: Synthetic polypeptide
AEATTAAGGAEEETAEAAGCGTAEAAGSPAGSPTSTEEGTSESATPESGPGTSTEPSEGSAPGSPAGSPTSTEEGTSTEPSEGSAPGTSTEPSEGSAPGTSESATPESGPGSEPATSGSETPGSEPATSGSETPGSPAGSPTSTEEGTSESATPESGPGTSTEPSEGSAPGTSTEPSEGSAPGSPAGSPTSTEEGTSTEPSEGSAPGTSTEPSEGSAPGTSESATPESGPGTSTEPSEGSAPGTSESATPESGPGSEPATSGSETPGTSTEPSEGSAPGTSTEPSEGSAPGTSESATPESGPGTSESATPESGPGSPAGSPTSTEEGTSESATPESGPGSEPATSGSETPGTSESATPESGPGTSTEPSEGSAPGTSTEPSEGSAPGTSTEPSEGSAPGTSTEPSEGSAPGTSTEPSEGSAPGTSTEPSEGSAPGSPAGSPTSTEEGTSTEPSEGSAPGTSESATPESGPGSEPATSGSETPGTSESATPESGPGSEPATSGSETPGTSESATPESGPGTSTEPSEGSAPGTSESATPESGPGSPAGSPTSTEEGSPAGSPTSTEEGSPAGSPTSTEEGTSESATPESGPGTSTEPSEGSAPGTSESATPESGPGSEPATSGSETPGTSESATPESGPGSEPATSGSETPGTSESATPESGPGTSTEPSEGSAPGSPAGSPTSTEEGTSESATPESGPGSEPATSGSETPGTSESATPESGPGSPAGSPTSTEEGSPAGSPTSTEEGTSTEPSEGSAPGTSESATPESGPGTSESATPESGPGTSESATPESGPGSEPATSGSETPGSEPATSGSETPGSPAGSPTSTEEGTSTEPSEGSAPGTSTEPSEGSAPGSEPATSGSETPGTSESATPESGPGTSTEPSEGSAPTAEAAGCGTAEAARPRPRPRP

SEQ ID NO: 241 - protein, 924 aa, synthetic construct
  REGION 1..924: note = Description of Artificial Sequence: Synthetic polypeptide
AEATTAAGGAEEETAEAAGCGTAEAAGSPAGSPTSTEEGTSESATPESGPGTSTEPSEGSAPGSPAGSPTSTEEGTSTEPSEGSAPGTSTEPSEGSAPGTSESATPESGPGSEPATSGSETPGSEPATSGSETPGSPAGSPTSTEEGTSESATPESGPGTSTEPSEGSAPGTSTEPSEGSAPGSPAGSPTSTEEGTSTEPSEGSAPGTSTEPSEGSAPGTSESATPESGPGTSTEPSEGSAPGTSESATPESGPGSEPATSGSETPGTSTEPSEGSAPGTSTEPSEGSAPGTSESATPESGPGTSESATPESGPGSPAGSPTSTEEGTSESATPESGPGSEPATSGSETPGTSESATPESGPGTSTEPSEGSAPGTSTEPSEGSAPGTSTEPSEGSAPGTSTEPSEGSAPGTSTEPSEGSAPGTSTEPSEGSAPGSPAGSPTSTEEGTSTEPSEGSAPTAEAAGCGTAEAAGTSESATPESGPGSEPATSGSETPGTSESATPESGPGSEPATSGSETPGTSESATPESGPGTSTEPSEGSAPGTSESATPESGPGSPAGSPTSTEEGSPAGSPTSTEEGSPAGSPTSTEEGTSESATPESGPGTSTEPSEGSAPGTSESATPESGPGSEPATSGSETPGTSESATPESGPGSEPATSGSETPGTSESATPESGPGTSTEPSEGSAPGSPAGSPTSTEEGTSESATPESGPGSEPATSGSETPGTSESATPESGPGSPAGSPTSTEEGSPAGSPTSTEEGTSTEPSEGSAPGTSESATPESGPGTSESATPESGPGTSESATPESGPGSEPATSGSETPGSEPATSGSETPGSPAGSPTSTEEGTSTEPSEGSAPGTSTEPSEGSAPGSEPATSGSETPGTSESATPESGPGTSTEPSEGSAPTAEAAGCGTAEAARPRPRPRP

SEQ ID NO: 242 - protein, 937 aa, synthetic construct
  REGION 1..937: note = Description of Artificial Sequence: Synthetic polypeptide
AEATTAAGGAEEETAEAAGCGTAEAAGSPAGSPTSTEEGTSESATPESGPGTSTEPSEGSAPGSPAGSPTSTEEGTSTEPSEGSAPGTSTEPSEGSAPGTSESATPESGPGSEPATSGSETPGSEPATSGSETPGSPAGSPTSTEEGTSESATPESGPGTSTEPSEGSAPGTSTEPSEGSAPGSPAGSPTSTEEGTSTEPSEGSAPGTSTEPSEGSAPGTSESATPESGPGTSTEPSEGSAPGTSESATPESGPGSEPATSGSETPGTSTEPSEGSAPGTSTEPSEGSAPGTSESATPESGPGTSESATPESGPTAEAAGCGTAEAAGSPAGSPTSTEEGTSESATPESGPGSEPATSGSETPGTSESATPESGPGTSTEPSEGSAPGTSTEPSEGSAPGTSTEPSEGSAPGTSTEPSEGSAPGTSTEPSEGSAPGTSTEPSEGSAPGSPAGSPTSTEEGTSTEPSEGSAPGTSESATPESGPGSEPATSGSETPGTSESATPESGPGSEPATSGSETPGTSESATPESGPGTSTEPSEGSAPGTSESATPESGPGSPAGSPTSTEEGSPAGSPTSTEEGSPAGSPTSTEEGTSESATPESGPGTSTEPSEGSAPTAEAAGCGTAEAAGTSESATPESGPGSEPATSGSETPGTSESATPESGPGSEPATSGSETPGTSESATPESGPGTSTEPSEGSAPGSPAGSPTSTEEGTSESATPESGPGSEPATSGSETPGTSESATPESGPGSPAGSPTSTEEGSPAGSPTSTEEGTSTEPSEGSAPGTSESATPESGPGTSESATPESGPGTSESATPESGPGSEPATSGSETPGSEPATSGSETPGSPAGSPTSTEEGTSTEPSEGSAPGTSTEPSEGSAPGSEPATSGSETPGTSESATPESGPGTSTEPSEGSAPTAEAAGCGTAEAARPRPRPRP

SEQ ID NO: 243 - protein, 891 aa, synthetic construct; identical to SEQ ID NO: 231
  REGION 1..891: note = Description of Artificial Sequence: Synthetic polypeptide

SEQ ID NO: 244 - protein, 904 aa, synthetic construct; identical to SEQ ID NO: 232
  REGION 1..904: note = Description of Artificial Sequence: Synthetic polypeptide

SEQ ID NO: 245 - protein, 917 aa, synthetic construct; identical to SEQ ID NO: 233
  REGION 1..917: note = Description of Artificial Sequence: Synthetic polypeptide

SEQ ID NO: 246 - protein, 930 aa, synthetic construct; identical to SEQ ID NO: 234
  REGION 1..930: note = Description of Artificial Sequence: Synthetic polypeptide

SEQ ID NO: 247 - protein, 914 aa, synthetic construct
  REGION 1..914: note = Description of Artificial Sequence: Synthetic polypeptide
AEATTAAGGAEEETAEAAGCGTAEAAGSPAGSPTSTEEGTSESATPESGPGTSTEPSEGSAPGSPAGSPTSTEEGTSTEPSEGSAPGTSTEPSEGSAPGTSESATPESGPGSEPATSGSETPGSEPATSGSETPGSPAGSPTSTEEGTSESATPESGPGTSTEPSEGSAPGTSTEPSEGSAPGSPAGSPTSTEEGTSTEPSEGSAPGTSTEPSEGSAPGTSESATPESGPGTSTEPSEGSAPGTSESATPESGPGSEPATSGSETPGTSTEPSEGSAPGTSTEPSEGSAPGTSESATPESGPGTSESATPESGPGGKPGGSPAGSPTSTEEGTSESATPESGPGSEPATSGSETPGTSESATPESGPGTSTEPSEGSAPGTSTEPSEGSAPGTSTEPSEGSAPGTSTEPSEGSAPGTSTEPSEGSAPGTSTEPSEGSAPGSPAGSPTSTEEGTSTEPSEGSAPGTSESATPESGPGSEPATSGSETPGTSESATPESGPGSEPATSGSETPGTSESATPESGPGTSTEPSEGSAPGTSESATPESGPGSPAGSPTSTEEGSPAGSPTSTEEGSPAGSPTSTEEGTSESATPESGPGTSTEPSEGSAPTAEAAGCGTAEAAGTSESATPESGPGSEPATSGSETPGTSESATPESGPGSEPATSGSETPGTSESATPESGPGTSTEPSEGSAPGSPAGSPTSTEEGTSESATPESGPGSEPATSGSETPGTSESATPESGPGSPAGSPTSTEEGSPAGSPTSTEEGTSTEPSEGSAPGTSESATPESGPGTSESATPESGPGTSESATPESGPGSEPATSGSETPGSEPATSGSETPGSPAGSPTSTEEGTSTEPSEGSAPGTSTEPSEGSAPGSEPATSGSETPGTSESATPESGPGTSTEPSEGSAPGGKPGR

SEQ ID NO: 248 - protein, 922 aa, synthetic construct
  REGION 1..922: note = Description of Artificial Sequence: Synthetic polypeptide
AEATTAAGGAEEETAEAAGCGTAEAAGSPAGSPTSTEEGTSESATPESGPGTSTEPSEGSAPGSPAGSPTSTEEGTSTEPSEGSAPGTSTEPSEGSAPGTSESATPESGPGSEPATSGSETPGSEPATSGSETPGSPAGSPTSTEEGTSESATPESGPGTSTEPSEGSAPGTSTEPSEGSAPGSPAGSPTSTEEGTSTEPSEGSAPGTSTEPSEGSAPGTSESATPESGPGTSTEPSEGSAPGTSESATPESGPGSEPATSGSETPGTSTEPSEGSAPGTSTEPSEGSAPGTSESATPESGPGTSESATPESGPTAEAAGCGTAEAAGSPAGSPTSTEEGTSESATPESGPGSEPATSGSETPGTSESATPESGPGTSTEPSEGSAPGTSTEPSEGSAPGTSTEPSEGSAPGTSTEPSEGSAPGTSTEPSEGSAPGTSTEPSEGSAPGSPAGSPTSTEEGTSTEPSEGSAPGTSESATPESGPGSEPATSGSETPGTSESATPESGPGSEPATSGSETPGTSESATPESGPGTSTEPSEGSAPGTSESATPESGPGSPAGSPTSTEEGSPAGSPTSTEEGSPAGSPTSTEEGTSESATPESGPGTSTEPSEGSAPTAEAAGCGTAEAAGTSESATPESGPGSEPATSGSETPGTSESATPESGPGSEPATSGSETPGTSESATPESGPGTSTEPSEGSAPGSPAGSPTSTEEGTSESATPESGPGSEPATSGSETPGTSESATPESGPGSPAGSPTSTEEGSPAGSPTSTEEGTSTEPSEGSAPGTSESATPESGPGTSESATPESGPGTSESATPESGPGSEPATSGSETPGSEPATSGSETPGSPAGSPTSTEEGTSTEPSEGSAPGTSTEPSEGSAPGSEPATSGSETPGTSESATPESGPGTSTEPSEGSAPGGKPGR

SEQ ID NO: 249 - protein, 906 aa, synthetic construct
  REGION 1..906: note = Description of Artificial Sequence: Synthetic polypeptide
AEATTAAGGAEEEGGKPGGSPAGSPTSTEEGTSESATPESGPGTSTEPSEGSAPGSPAGSPTSTEEGTSTEPSEGSAPGTSTEPSEGSAPGTSESATPESGPGSEPATSGSETPGSEPATSGSETPGSPAGSPTSTEEGTSESATPESGPGTSTEPSEGSAPGTSTEPSEGSAPGSPAGSPTSTEEGTSTEPSEGSAPGTSTEPSEGSAPGTSESATPESGPGTSTEPSEGSAPGTSESATPESGPGSEPATSGSETPGTSTEPSEGSAPGTSTEPSEGSAPGTSESATPESGPGTSESATPESGPGGKPGGSPAGSPTSTEEGTSESATPESGPGSEPATSGSETPGTSESATPESGPGTSTEPSEGSAPGTSTEPSEGSAPGTSTEPSEGSAPGTSTEPSEGSAPGTSTEPSEGSAPGTSTEPSEGSAPGSPAGSPTSTEEGTSTEPSEGSAPGTSESATPESGPGSEPATSGSETPGTSESATPESGPGSEPATSGSETPGTSESATPESGPGTSTEPSEGSAPGTSESATPESGPGSPAGSPTSTEEGSPAGSPTSTEEGSPAGSPTSTEEGTSESATPESGPGTSTEPSEGSAPGGKPGGTSESATPESGPGSEPATSGSETPGTSESATPESGPGSEPATSGSETPGTSESATPESGPGTSTEPSEGSAPGSPAGSPTSTEEGTSESATPESGPGSEPATSGSETPGTSESATPESGPGSPAGSPTSTEEGSPAGSPTSTEEGTSTEPSEGSAPGTSESATPESGPGTSESATPESGPGTSESATPESGPGSEPATSGSETPGSEPATSGSETPGSPAGSPTSTEEGTSTEPSEGSAPGTSTEPSEGSAPGSEPATSGSETPGTSESATPESGPGTSTEPSEGSAPTAEAAGCGTAEAAR

SEQ ID NO: 250 - protein, 914 aa, synthetic construct; identical to SEQ ID NO: 247
  REGION 1..914: note = Description of Artificial Sequence: Synthetic polypeptide

SEQ ID NO: 251 - protein, 603 aa, synthetic construct
  REGION 1..603: note = Description of Artificial Sequence: Synthetic polypeptide
AEATTAAGGAEEEGSPAGSPTSTEEGTSESATPESGPGTSTEPSEGSAPGSPAGSPTSTEEGTSTEPSEGSAPGTSTEPSEGSAPGTSESATPESGPGSEPATSGSETPGSEPATSGSETPGSPAGSPTSTEEGTSESATPESGPGTSTEPSEGSAPGTSTEPSEGSAPGSPAGSPTSTEEGTSTEPSEGSAPGTSTEPSEGSAPGTSESATPESGPGTSTEPSEGSAPGTSESATPESGPGSEPATSGSETPGTSTEPSEGSAPGTSTEPSEGSAPGTSESATPESGPGTSESATPESGPGSPAGSPTSTEEGTSESATPESGPGSEPATSGSETPGTSESATPESGPGTSTEPSEGSAPGTSTEPSEGSAPGTSTEPSEGSAPGTSTEPSEGSAPGTSTEPSEGSAPGTSTEPSEGSAPGSPAGSPTSTEEGTSTEPSEGSAPGTSESATPESGPGSEPATSGSETPGTSESATPESGPGSEPATSGSETPGTSESATPESGPGTSTEPSEGSAPGTSESATPESGPGSPAGSPTSTEEGSPAGSPTSTEEGSPAGSPTSTEEGTSESATPESGPGTSTEPSEGSAPTAEAAGCGTAEAAR

SEQ ID NO: 252 - protein, 459 aa, synthetic construct
  REGION 1..459: note = Description of Artificial Sequence: Synthetic polypeptide
AEATTAAGGAEEEGSPAGSPTSTEEGTSESATPESGPGTSTEPSEGSAPGSPAGSPTSTEEGTSTEPSEGSAPGTSTEPSEGSAPGTSESATPESGPGSEPATSGSETPGSEPATSGSETPGSPAGSPTSTEEGTSESATPESGPGTSTEPSEGSAPGTSTEPSEGSAPGSPAGSPTSTEEGTSTEPSEGSAPGTSTEPSEGSAPGTSESATPESGPGTSTEPSEGSAPGTSESATPESGPGSEPATSGSETPGTSTEPSEGSAPGTSTEPSEGSAPGTSESATPESGPGTSESATPESGPGSPAGSPTSTEEGTSESATPESGPGSEPATSGSETPGTSESATPESGPGTSTEPSEGSAPGTSTEPSEGSAPGTSTEPSEGSAPGTSTEPSEGSAPGTSTEPSEGSAPGTSTEPSEGSAPGSPAGSPTSTEEGTSTEPSEGSAPTAEAAGCGTAEAAR

SEQ ID NO: 253 - protein, 315 aa, synthetic construct
  REGION 1..315: note = Description of Artificial Sequence: Synthetic polypeptide
AEATTAAGGAEEEGSPAGSPTSTEEGTSESATPESGPGTSTEPSEGSAPGSPAGSPTSTEEGTSTEPSEGSAPGTSTEPSEGSAPGTSESATPESGPGSEPATSGSETPGSEPATSGSETPGSPAGSPTSTEEGTSESATPESGPGTSTEPSEGSAPGTSTEPSEGSAPGSPAGSPTSTEEGTSTEPSEGSAPGTSTEPSEGSAPGTSESATPESGPGTSTEPSEGSAPGTSESATPESGPGSEPATSGSETPGTSTEPSEGSAPGTSTEPSEGSAPGTSESATPESGPGTSESATPESGPTAEAAGCGTAEAAR

SEQ ID NO: 254 - protein, 171 aa, synthetic construct
  REGION 1..171: note = Description of Artificial Sequence: Synthetic polypeptide
AEATTAAGGAEEEGSPAGSPTSTEEGTSESATPESGPGTSTEPSEGSAPGSPAGSPTSTEEGTSTEPSEGSAPGTSTEPSEGSAPGTSESATPESGPGSEPATSGSETPGSEPATSGSETPGSPAGSPTSTEEGTSESATPESGPGTSTEPSEGSAPTAEAAGCGTAEAAR

SEQ ID NO: 255 - protein, 603 aa, synthetic construct; identical to SEQ ID NO: 251
  REGION 1..603: note = Description of Artificial Sequence: Synthetic polypeptide

SEQ ID NO: 256 - protein, 459 aa, synthetic construct; identical to SEQ ID NO: 252
  REGION 1..459: note = Description of Artificial Sequence: Synthetic polypeptide

SEQ ID NO: 257 - protein, 315 aa, synthetic construct; identical to SEQ ID NO: 253
  REGION 1..315: note = Description of Artificial Sequence: Synthetic polypeptide

SEQ ID NO: 258 - protein, 171 aa, synthetic construct; identical to SEQ ID NO: 254
  REGION 1..171: note = Description of Artificial Sequence: Synthetic polypeptide

SEQ ID NO: 259 - protein, 595 aa, synthetic construct
  REGION 1..595: note = Description of Artificial Sequence: Synthetic polypeptide
AEATTAAGGAEEEGSPAGSPTSTEEGTSESATPESGPGTSTEPSEGSAPGSPAGSPTSTEEGTSTEPSEGSAPGTSTEPSEGSAPGTSESATPESGPGSEPATSGSETPGSEPATSGSETPGSPAGSPTSTEEGTSESATPESGPGTSTEPSEGSAPGTSTEPSEGSAPGSPAGSPTSTEEGTSTEPSEGSAPGTSTEPSEGSAPGTSESATPESGPGTSTEPSEGSAPGTSESATPESGPGSEPATSGSETPGTSTEPSEGSAPGTSTEPSEGSAPGTSESATPESGPGTSESATPESGPGSPAGSPTSTEEGTSESATPESGPGSEPATSGSETPGTSESATPESGPGTSTEPSEGSAPGTSTEPSEGSAPGTSTEPSEGSAPGTSTEPSEGSAPGTSTEPSEGSAPGTSTEPSEGSAPGSPAGSPTSTEEGTSTEPSEGSAPGTSESATPESGPGSEPATSGSETPGTSESATPESGPGSEPATSGSETPGTSESATPESGPGTSTEPSEGSAPGTSESATPESGPGSPAGSPTSTEEGSPAGSPTSTEEGSPAGSPTSTEEGTSESATPESGPGTSTEPSEGSAPGGKPGR

SEQ ID NO: 260 - protein, 451 aa, synthetic construct
  REGION 1..451: note = Description of Artificial Sequence: Synthetic polypeptide
AEATTAAGGAEEEGSPAGSPTSTEEGTSESATPESGPGTSTEPSEGSAPGSPAGSPTSTEEGTSTEPSEGSAPGTSTEPSEGSAPGTSESATPESGPGSEPATSGSETPGSEPATSGSETPGSPAGSPTSTEEGTSESATPESGPGTSTEPSEGSAPGTSTEPSEGSAPGSPAGSPTSTEEGTSTEPSEGSAPGTSTEPSEGSAPGTSESATPESGPGTSTEPSEGSAPGTSESATPESGPGSEPATSGSETPGTSTEPSEGSAPGTSTEPSEGSAPGTSESATPESGPGTSESATPESGPGSPAGSPTSTEEGTSESATPESGPGSEPATSGSETPGTSESATPESGPGTSTEPSEGSAPGTSTEPSEGSAPGTSTEPSEGSAPGTSTEPSEGSAPGTSTEPSEGSAPGTSTEPSEGSAPGSPAGSPTSTEEGTSTEPSEGSAPGGKPGR

SEQ ID NO: 261 - protein, 307 aa, synthetic construct
  REGION 1..307: note = Description of Artificial Sequence: Synthetic polypeptide
AEATTAAGGAEEEGSPAGSPTSTEEGTSESATPESGPGTSTEPSEGSAPGSPAGSPTSTEEGTSTEPSEGSAPGTSTEPSEGSAPGTSESATPESGPGSEPATSGSETPGSEPATSGSETPGSPAGSPTSTEEGTSESATPESGPGTSTEPSEGSAPGTSTEPSEGSAPGSPAGSPTSTEEGTSTEPSEGSAPGTSTEPSEGSAPGTSESATPESGPGTSTEPSEGSAPGTSESATPESGPGSEPATSGSETPGTSTEPSEGSAPGTSTEPSEGSAPGTSESATPESGPGTSESATPESGPGGKPGR

SEQ ID NO: 262 - protein, 163 aa, synthetic construct
  REGION 1..163: note = Description of Artificial Sequence: Synthetic polypeptide
AEATTAAGGAEEEGSPAGSPTSTEEGTSESATPESGPGTSTEPSEGSAPGSPAGSPTSTEEGTSTEPSEGSAPGTSTEPSEGSAPGTSESATPESGPGSEPATSGSETPGSEPATSGSETPGSPAGSPTSTEEGTSESATPESGPGTSTEPSEGSAPGGKPGR

SEQ ID NO: 263 - protein, 595 aa, synthetic construct; identical to SEQ ID NO: 259
  REGION 1..595: note = Description of Artificial Sequence: Synthetic polypeptide

SEQ ID NO: 264 - protein, 451 aa, synthetic construct; identical to SEQ ID NO: 260
  REGION 1..451: note = Description of Artificial Sequence: Synthetic polypeptide

SEQ ID NO: 265 - protein, 307 aa, synthetic construct; identical to SEQ ID NO: 261
  REGION 1..307: note = Description of Artificial Sequence: Synthetic polypeptide

SEQ ID NO: 266 - protein, 163 aa, synthetic construct; identical to SEQ ID NO: 262
  REGION 1..163: note = Description of Artificial Sequence: Synthetic polypeptide

SEQ ID NO: 267 - protein, 879 aa, synthetic construct
  REGION 1..879: note = Description of Artificial Sequence: Synthetic polypeptide
AGASPGTSSTGSPGSSPSASTGTGPGSSPSASTGTGPGTPGSGTASSSPGSSTPSGATGSPGSSPSASTGTGPGASPGTSSTGSPGTPGSGTASSSPGSSTPSGATGSPGTPGSGTASSSPGASPGTSSTGSPGASPGTSSTGSPGTPGSGTASSSPGSSTPSGATGSPGASPGTSSTGSPGTPGSGTASSSPGSSTPSGATGSPGSSPSASTGTGPGSSPSASTGTGPGSSTPSGATGSPGSSTPSGATGSPGASPGTSSTGSPGASPGTSSTGSPGASPGTSSTGSPGTPGSGTASSSPGASPGTSSTGSPGASPGTSSTGSPGASPGTSSTGSPGSSPSASTGTGPGTPGSGTASSSPGASPGTSSTGSPGASPGTSSTGSPGASPGTSSTGSPGSSTPSGATGSPGSSTPSGATGSPGASPGTSSTGSPTAEAAGCGTAEAAGTPGSGTASSSPGSSTPSGATGSPGSSTPSGATGSPGSSTPSGATGSPGSSPSASTGTGPGASPGTSSTGSPGASPGTSSTGSPGTPGSGTASSSPGASPGTSSTGSPGASPGTSSTGSPGASPGTSSTGSPGASPGTSSTGSPGTPGSGTASSSPGSSTPSGATGSPGTPGSGTASSSPGSSTPSGATGSPGTPGSGTASSSPGSSTPSGATGSPGSSTPSGATGSPGSSPSASTGTGPGSSPSASTGTGPGASPGTSSTGSPGTPGSGTASSSPGSSTPSGATGSPGSSPSASTGTGPGSSPSASTGTGPGASPGTSSTGSPGASPGTSSTGSPGSSTPSGATGSPGSSPSASTGTGPGASPGTSSTGSPGSSPSASTGTGPGTPGSGTASSSPGSSTPSGATGSPGSSTPSGATGSPGASPGTSSTGSPR

SEQ ID NO: 268 - protein, 892 aa, synthetic construct
  REGION 1..892: note = Description of Artificial Sequence: Synthetic polypeptide
ATAEAAGCGTAEAAGASPGTSSTGSPGSSPSASTGTGPGSSPSASTGTGPGTPGSGTASSSPGSSTPSGATGSPGSSPSASTGTGPGASPGTSSTGSPGTPGSGTASSSPGSSTPSGATGSPGTPGSGTASSSPGASPGTSSTGSPGASPGTSSTGSPGTPGSGTASSSPGSSTPSGATGSPGASPGTSSTGSPGTPGSGTASSSPGSSTPSGATGSPGSSPSASTGTGPGSSPSASTGTGPGSSTPSGATGSPGSSTPSGATGSPGASPGTSSTGSPGASPGTSSTGSPGASPGTSSTGSPGTPGSGTASSSPGASPGTSSTGSPGASPGTSSTGSPGASPGTSSTGSPGSSPSASTGTGPGTPGSGTASSSPGASPGTSSTGSPGASPGTSSTGSPGASPGTSSTGSPGSSTPSGATGSPGSSTPSGATGSPGASPGTSSTGSPGTPGSGTASSSPGSSTPSGATGSPGSSTPSGATGSPGSSTPSGATGSPGSSPSASTGTGPGASPGTSSTGSPGASPGTSSTGSPGTPGSGTASSSPGASPGTSSTGSPGASPGTSSTGSPGASPGTSSTGSPGASPGTSSTGSPGTPGSGTASSSPGSSTPSGATGSPGTPGSGTASSSPGSSTPSGATGSPGTPGSGTASSSPGSSTPSGATGSPGSSTPSGATGSPGSSPSASTGTGPGSSPSASTGTGPGASPGTSSTGSPGTPGSGTASSSPGSSTPSGATGSPGSSPSASTGTGPGSSPSASTGTGPGASPGTSSTGSPGASPGTSSTGSPGSSTPSGATGSPGSSPSASTGTGPGASPGTSSTGSPGSSPSASTGTGPGTPGSGTASSSPGSSTPSGATGSPGSSTPSGATGSPGASPGTSSTGSPTAEAAGCGTAEAAR

SEQ ID NO: 269 - protein, 905 aa, synthetic construct
  REGION 1..905: note = Description of Artificial Sequence: Synthetic polypeptide
ATAEAAGCGTAEAAGASPGTSSTGSPGSSPSASTGTGPGSSPSASTGTGPGTPGSGTASSSPGSSTPSGATGSPGSSPSASTGTGPGASPGTSSTGSPGTPGSGTASSSPGSSTPSGATGSPGTPGSGTASSSPGASPGTSSTGSPGASPGTSSTGSPGTPGSGTASSSPGSSTPSGATGSPGASPGTSSTGSPGTPGSGTASSSPGSSTPSGATGSPGSSPSASTGTGPGSSPSASTGTGPGSSTPSGATGSPGSSTPSGATGSPGASPGTSSTGSPGASPGTSSTGSPGASPGTSSTGSPGTPGSGTASSSPGASPGTSSTGSPGASPGTSSTGSPGASPGTSSTGSPGSSPSASTGTGPGTPGSGTASSSPGASPGTSSTGSPGASPGTSSTGSPGASPGTSSTGSPGSSTPSGATGSPGSSTPSGATGSPGASPGTSSTGSPTAEAAGCGTAEAAGTPGSGTASSSPGSSTPSGATGSPGSSTPSGATGSPGSSTPSGATGSPGSSPSASTGTGPGASPGTSSTGSPGASPGTSSTGSPGTPGSGTASSSPGASPGTSSTGSPGASPGTSSTGSPGASPGTSSTGSPGASPGTSSTGSPGTPGSGTASSSPGSSTPSGATGSPGTPGSGTASSSPGSSTPSGATGSPGTPGSGTASSSPGSSTPSGATGSPGSSTPSGATGSPGSSPSASTGTGPGSSPSASTGTGPGASPGTSSTGSPGTPGSGTASSSPGSSTPSGATGSPGSSPSASTGTGPGSSPSASTGTGPGASPGTSSTGSPGASPGTSSTGSPGSSTPSGATGSPGSSPSASTGTGPGASPGTSSTGSPGSSPSASTGTGPGTPGSGTASSSPGSSTPSGATGSPGSSTPSGATGSPGASPGTSSTGSPTAEAAGCGTAEAAR

SEQ ID NO: 270 - protein, 918 aa, synthetic construct
  REGION 1..918: note = Description of Artificial Sequence: Synthetic polypeptide
ATAEAAGCGTAEAAGASPGTSSTGSPGSSPSASTGTGPGSSPSASTGTGPGTPGSGTASSSPGSSTPSGATGSPGSSPSASTGTGPGASPGTSSTGSPGTPGSGTASSSPGSSTPSGATGSPGTPGSGTASSSPGASPGTSSTGSPGASPGTSSTGSPGTPGSGTASSSPGSSTPSGATGSPGASPGTSSTGSPGTPGSGTASSSPGSSTPSGATGSPGSSPSASTGTGPGSSPSASTGTGPGSSTPSGATGSPGSSTPSGATGSPGASPGTSSTGSPGASPGTSSTGSPGASPGTSSTGSPTAEAAGCGTAEAAGTPGSGTASSSPGASPGTSSTGSPGASPGTSSTGSPGASPGTSSTGSPGSSPSASTGTGPGTPGSGTASSSPGASPGTSSTGSPGASPGTSSTGSPGASPGTSSTGSPGSSTPSGATGSPGSSTPSGATGSPGASPGTSSTGSPGTPGSGTASSSPGSSTPSGATGSPGSSTPSGATGSPGSSTPSGATGSPGSSPSASTGTGPGASPGTSSTGSPGASPGTSSTGSPGTPGSGTASSSPGASPGTSSTGSPGASPGTSSTGSPGASPGTSSTGSPGASPGTSSTGSPTAEAAGCGTAEAAGTPGSGTASSSPGSSTPSGATGSPGTPGSGTASSSPGSSTPSGATGSPGTPGSGTASSSPGSSTPSGATGSPGSSTPSGATGSPGSSPSASTGTGPGSSPSASTGTGPGASPGTSSTGSPGTPGSGTASSSPGSSTPSGATGSPGSSPSASTGTGPGSSPSASTGTGPGASPGTSSTGSPGASPGTSSTGSPGSSTPSGATGSPGSSPSASTGTGPGASPGTSSTGSPGSSPSASTGTGPGTPGSGTASSSPGSSTPSGATGSPGSSTPSGATGSPGASPGTSSTGSPTAEAAGCGTAEAAR

SEQ ID NO: 271 - protein, 931 aa, synthetic construct
  REGION 1..931: note = Description of Artificial Sequence: Synthetic polypeptide
ATAEAAGCGTAEAAGASPGTSSTGSPGSSPSASTGTGPGSSPSASTGTGPGTPGSGTASSSPGSSTPSGATGSPGSSPSASTGTGPGASPGTSSTGSPGTPGSGTASSSPGSSTPSGATGSPGTPGSGTASSSPGASPGTSSTGSPGASPGTSSTGSPGTPGSGTASSSPGSSTPSGATGSPGASPGTSSTGSPGTPGSGTASSSPGSSTPSGATGSPGSSPSASTGTGPTAEAAGCGTAEAAGSSPSASTGTGPGSSTPSGATGSPGSSTPSGATGSPGASPGTSSTGSPGASPGTSSTGSPGASPGTSSTGSPGTPGSGTASSSPGASPGTSSTGSPGASPGTSSTGSPGASPGTSSTGSPGSSPSASTGTGPGTPGSGTASSSPGASPGTSSTGSPGASPGTSSTGSPGASPGTSSTGSPGSSTPSGATGSPGSSTPSGATGSPGASPGTSSTGSPTAEAAGCGTAEAAGTPGSGTASSSPGSSTPSGATGSPGSSTPSGATGSPGSSTPSGATGSPGSSPSASTGTGPGASPGTSSTGSPGASPGTSSTGSPGTPGSGTASSSPGASPGTSSTGSPGASPGTSSTGSPGASPGTSSTGSPGASPGTSSTGSPGTPGSGTASSSPGSSTPSGATGSPGTPGSGTASSSPGSSTPSGATGSPGTPGSGTASSSPGSSTPSGATGSPTAEAAGCGTAEAAGSSTPSGATGSPGSSPSASTGTGPGSSPSASTGTGPGASPGTSSTGSPGTPGSGTASSSPGSSTPSGATGSPGSSPSASTGTGPGSSPSASTGTGPGASPGTSSTGSPGASPGTSSTGSPGSSTPSGATGSPGSSPSASTGTGPGASPGTSSTGSPGSSPSASTGTGPGTPGSGTASSSPGSSTPSGATGSPGSSTPSGATGSPGASPGTSSTGSPTAEAAGCGTAEAAR

SEQ ID NO: 272 - protein, 944 aa, synthetic construct
  REGION 1..944: note = Description of Artificial Sequence: Synthetic polypeptide
ATAEAAGCGTAEAAGASPGTSSTGSPGSSPSASTGTGPGSSPSASTGTGPGTPGSGTASSSPGSSTPSGATGSPGSSPSASTGTGPGASPGTSSTGSPGTPGSGTASSSPGSSTPSGATGSPGTPGSGTASSSPGASPGTSSTGSPGASPGTSSTGSPGTPGSGTASSSPGSSTPSGATGSPGASPGTAEAAGCGTAEAATSSTGSPGTPGSGTASSSPGSSTPSGATGSPGSSPSASTGTGPGSSPSASTGTGPGSSTPSGATGSPGSSTPSGATGSPGASPGTSSTGSPGASPGTSSTGSPGASPGTSSTGSPGTPGSGTASSSPGASPGTSSTGSPGASPGTSSTGSPGASPGTSSTGSPGSSPSASTGTTAEAAGCGTAEAAGPGTPGSGTASSSPGASPGTSSTGSPGASPGTSSTGSPGASPGTSSTGSPGSSTPSGATGSPGSSTPSGATGSPGASPGTSSTGSPGTPGSGTASSSPGSSTPSGATGSPGSSTPSGATGSPGSSTPSGATGSPGSSPSASTGTGPGASPGTSSTGSPGASPGTSSTGSPGTTAEAAGCGTAEAAPGSGTASSSPGASPGTSSTGSPGASPGTSSTGSPGASPGTSSTGSPGASPGTSSTGSPGTPGSGTASSSPGSSTPSGATGSPGTPGSGTASSSPGSSTPSGATGSPGTPGSGTASSSPGSSTPSGATGSPGSSTPSGATGSPGSSPSASTGTGPGSSPSASTGTGPGASPGTSTAEAAGCGTAEAASTGSPGTPGSGTASSSPGSSTPSGATGSPGSSPSASTGTGPGSSPSASTGTGPGASPGTSSTGSPGASPGTSSTGSPGSSTPSGATGSPGSSPSASTGTGPGASPGTSSTGSPGSSPSASTGTGPGTPGSGTASSSPGSSTPSGATGSPGSSTPSGATGSPGASPGTSSTGSPTAEAAGCGTAEAAR

SEQ ID NO: 273 - protein, 957 aa, synthetic construct
  REGION 1..957: note = Description of Artificial Sequence: Synthetic polypeptide
ATAEAAGCGTAEAAGASPGTSSTGSPGSSPSASTGTGPGSSPSASTGTGPGTPGSGTASSSPGSSTPSGATGSPGSSPSASTGTGPGASPGTSSTGSPGTPGSGTASSSPGSSTPSGATGSPGTPGSGTASSSPGASPGTSSTGSPGASPGTSSTGSPTAEAAGCGTAEAAGTPGSGTASSSPGSSTPSGATGSPGASPGTSSTGSPGTPGSGTASSSPGSSTPSGATGSPGSSPSASTGTGPGSSPSASTGTGPGSSTPSGATGSPGSSTPSGATGSPGASPGTSSTGSPGASPGTSSTGSPGASPGTSSTGSPTAEAAGCGTAEAAGTPGSGTASSSPGASPGTSSTGSPGASPGTSSTGSPGASPGTSSTGSPGSSPSASTGTGPGTPGSGTASSSPGASPGTSSTGSPGASPGTSSTGSPGASPGTSSTGSPGSSTPSGATGSPGSSTPSGATGSPGASPGTSSTGSPTAEAAGCGTAEAAGTPGSGTASSSPGSSTPSGATGSPGSSTPSGATGSPGSSTPSGATGSPGSSPSASTGTGPGASPGTSSTGSPGASPGTSSTGSPGTPGSGTASSSPGASPGTSSTGSPGASPGTSSTGSPGASPGTSSTGSPGASPGTSSTGSPTAEAAGCGTAEAAGTPGSGTASSSPGSSTPSGATGSPGTPGSGTASSSPGSSTPSGATGSPGTPGSGTASSSPGSSTPSGATGSPGSSTPSGATGSPGSSPSASTGTGPGSSPSASTGTGPGASPGTSSTGSPGTPGSGTASSSPGSSTPSGATGSPTAEAAGCGTAEAAGSSPSASTGTGPGSSPSASTGTGPGASPGTSSTGSPGASPGTSSTGSPGSSTPSGATGSPGSSPSASTGTGPGASPGTSSTGSPGSSPSASTGTGPGTPGSGTASSSPGSSTPSGATGSPGSSTPSGATGSPGASPGTSSTGSPTAEAAGCGTAEAAR

SEQ ID NO: 274 - protein, 970 aa, synthetic construct
  REGION 1..970: note = Description of Artificial Sequence: Synthetic polypeptide
ATAEAAGCGTAEAAGASPGTSSTGSPGSSPSASTGTGPGSSPSASTGTGPGTPGSGTASSSPGSSTPSGATGSPGSSPSASTGTGPGASPGTSSTGSPGTPGSGTASSSPGSSTPSGATGSPGTPGSGTASSSPGASTAEAAGCGTAEAAPGTSSTGSPGASPGTSSTGSPGTPGSGTASSSPGSSTPSGATGSPGASPGTSSTGSPGTPGSGTASSSPGSSTPSGATGSPGSSPSASTGTGPGSSPSASTGTGPGSSTPSGATGSPGSSTPSGTAEAAGCGTAEAAATGSPGASPGTSSTGSPGASPGTSSTGSPGASPGTSSTGSPGTPGSGTASSSPGASPGTSSTGSPGASPGTSSTGSPGASPGTSSTGSPGSSPSASTGTGPGTPGSGTASSSPGASPGTSSTGTAEAAGCGTAEAASPGASPGTSSTGSPGASPGTSSTGSPGSSTPSGATGSPGSSTPSGATGSPGASPGTSSTGSPGTPGSGTASSSPGSSTPSGATGSPGSSTPSGATGSPGSSTPSGATGSPGSSPSASTGTGPGATAEAAGCGTAEAASPGTSSTGSPGASPGTSSTGSPGTPGSGTASSSPGASPGTSSTGSPGASPGTSSTGSPGASPGTSSTGSPGASPGTSSTGSPGTPGSGTASSSPGSSTPSGATGSPGTPGSGTASSSPGSSTPTAEAAGCGTAEAASGATGSPGTPGSGTASSSPGSSTPSGATGSPGSSTPSGATGSPGSSPSASTGTGPGSSPSASTGTGPGASPGTSSTGSPGTPGSGTASSSPGSSTPSGATGSPGSSPSASTGTGPGSSPSASTGTAEAAGCGTAEAATGPGASPGTSSTGSPGASPGTSSTGSPGSSTPSGATGSPGSSPSASTGTGPGASPGTSSTGSPGSSPSASTGTGPGTPGSGTASSSPGSSTPSGATGSPGSSTPSGATGSPGASPGTSSTGSPTAEAAGCGTAEAAR

SEQ ID NO: 275 - protein, 879 aa, synthetic construct
  REGION 1..879: note = Description of Artificial Sequence: Synthetic polypeptide
ATAEAAGCGTAEAAGASPGTSSTGSPGSSPSASTGTGPGSSPSASTGTGPGTPGSGTASSSPGSSTPSGATGSPGSSPSASTGTGPGASPGTSSTGSPGTPGSGTASSSPGSSTPSGATGSPGTPGSGTASSSPGASPGTSSTGSPGASPGTSSTGSPGTPGSGTASSSPGSSTPSGATGSPGASPGTSSTGSPGTPGSGTASSSPGSSTPSGATGSPGSSPSASTGTGPGSSPSASTGTGPGSSTPSGATGSPGSSTPSGATGSPGASPGTSSTGSPGASPGTSSTGSPGASPGTSSTGSPGTPGSGTASSSPGASPGTSSTGSPGASPGTSSTGSPGASPGTSSTGSPGSSPSASTGTGPGTPGSGTASSSPGASPGTSSTGSPGASPGTSSTGSPGASPGTSSTGSPGSSTPSGATGSPGSSTPSGATGSPGASPGTSSTGSPGTPGSGTASSSPGSSTPSGATGSPGSSTPSGATGSPGSSTPSGATGSPGSSPSASTGTGPGASPGTSSTGSPGASPGTSSTGSPGTPGSGTASSSPGASPGTSSTGSPGASPGTSSTGSPGASPGTSSTGSPGASPGTSSTGSPGTPGSGTASSSPGSSTPSGATGSPGTPGSGTASSSPGSSTPSGATGSPGTPGSGTASSSPGSSTPSGATGSPGSSTPSGATGSPGSSPSASTGTGPGSSPSASTGTGPGASPGTSSTGSPGTPGSGTASSSPGSSTPSGATGSPGSSPSASTGTGPGSSPSASTGTGPGASPGTSSTGSPGASPGTSSTGSPGSSTPSGATGSPGSSPSASTGTGPGASPGTSSTGSPGSSPSASTGTGPGTPGSGTASSSPGSSTPSGATGSPGSSTPSGATGSPGASPGTSSTGSPR

SEQ ID NO: 276 - protein, 879 aa, synthetic construct
  REGION 1..879: note = Description of Artificial Sequence: Synthetic polypeptide
AGASPGTSSTGSPGSSPSASTGTGPGSSPSASTGTGPGTPGSGTASSSPGSSTPSGATGSPGSSPSASTGTGPGASPGTSSTGSPGTPGSGTASSSPGSSTPSGATGSPGTPGSGTASSSPGASPGTSSTGSPGASPGTSSTGSPGTPGSGTASSSPGSSTPSGATGSPGASPGTSSTGSPGTPGSGTASSSPGSSTPSGATGSPGSSPSASTGTGPGSSPSASTGTGPGSSTPSGATGSPGSSTPSGATGSPGASPGTSSTGSPGASPGTSSTGSPGASPGTSSTGSPGTPGSGTASSSPGASPGTSSTGSPGASPGTSSTGSPGASPGTSSTGSPGSSPSASTGTGPGTPGSGTASSSPGASPGTSSTGSPGASPGTSSTGSPGASPGTSSTGSPGSSTPSGATGSPGSSTPSGATGSPGASPGTSSTGSPGTPGSGTASSSPGSSTPSGATGSPGSSTPSGATGSPGSSTPSGATGSPGSSPSASTGTGPGASPGTSSTGSPGASPGTSSTGSPGTPGSGTASSSPGASPGTSSTGSPGASPGTSSTGSPGASPGTSSTGSPGASPGTSSTGSPGTPGSGTASSSPGSSTPSGATGSPGTPGSGTASSSPGSSTPSGATGSPGTPGSGTASSSPGSSTPSGATGSPGSSTPSGATGSPGSSPSASTGTGPGSSPSASTGTGPGASPGTSSTGSPGTPGSGTASSSPGSSTPSGATGSPGSSPSASTGTGPGSSPSASTGTGPGASPGTSSTGSPGASPGTSSTGSPGSSTPSGATGSPGSSPSASTGTGPGASPGTSSTGSPGSSPSASTGTGPGTPGSGTASSSPGSSTPSGATGSPGSSTPSGATGSPGASPGTSSTGSPTAEAAGCGTAEAAR

SEQ ID NO: 277 - protein, 892 aa, synthetic construct
  REGION 1..892: note = Description of Artificial Sequence: Synthetic polypeptide
ATAEAAGCGTAEAAGASPGTSSTGSPGSSPSASTGTGPGSSPSASTGTGPGTPGSGTASSSPGSSTPSGATGSPGSSPSASTGTGPGASPGTSSTGSPGTPGSGTASSSPGSSTPSGATGSPGTPGSGTASSSPGASPGTSSTGSPGASPGTSSTGSPGTPGSGTASSSPGSSTPSGATGSPGASPGTSSTGSPGTPGSGTASSSPGSSTPSGATGSPGSSPSASTGTGPGSSPSASTGTGPGSSTPSGATGSPGSSTPSGATGSPGASPGTSSTGSPGASPGTSSTGSPGASPGTSSTGSPGTPGSGTASSSPGASPGTSSTGSPGASPGTSSTGSPGASPGTSSTGSPGSSPSASTGTGPGTPGSGTASSSPGASPGTSSTGSPGASPGTSSTGSPGASPGTSSTGSPGSSTPSGATGSPGSSTPSGATGSPGASPGTSSTGSPTAEAAGCGTAEAAGTPGSGTASSSPGSSTPSGATGSPGSSTPSGATGSPGSSTPSGATGSPGSSPSASTGTGPGASPGTSSTGSPGASPGTSSTGSPGTPGSGTASSSPGASPGTSSTGSPGASPGTSSTGSPGASPGTSSTGSPGASPGTSSTGSPGTPGSGTASSSPGSSTPSGATGSPGTPGSGTASSSPGSSTPSGATGSPGTPGSGTASSSPGSSTPSGATGSPGSSTPSGATGSPGSSPSASTGTGPGSSPSASTGTGPGASPGTSSTGSPGTPGSGTASSSPGSSTPSGATGSPGSSPSASTGTGPGSSPSASTGTGPGASPGTSSTGSPGASPGTSSTGSPGSSTPSGATGSPGSSPSASTGTGPGASPGTSSTGSPGSSPSASTGTGPGTPGSGTASSSPGSSTPSGATGSPGSSTPSGATGSPGASPGTSSTGSPR

SEQ ID NO: 278 - protein, 892 aa, synthetic construct
  REGION 1..892: note = Description of Artificial Sequence: Synthetic polypeptide
AGASPGTSSTGSPGSSPSASTGTGPGSSPSASTGTGPGTPGSGTASSSPGSSTPSGATGSPGSSPSASTGTGPGASPGTSSTGSPGTPGSGTASSSPGSSTPSGATGSPGTPGSGTASSSPGASPGTSSTGSPGASPGTSSTGSPGTPGSGTASSSPGSSTPSGATGSPGASPGTSSTGSPGTPGSGTASSSPGSSTPSGATGSPGSSPSASTGTGPGSSPSASTGTGPGSSTPSGATGSPGSSTPSGATGSPGASPGTSSTGSPGASPGTSSTGSPGASPGTSSTGSPGTPGSGTASSSPGASPGTSSTGSPGASPGTSSTGSPGASPGTSSTGSPGSSPSASTGTGPGTPGSGTASSSPGASPGTSSTGSPGASPGTSSTGSPGASPGTSSTGSPGSSTTAEAAGCGTAEAAPSGATGSPGSSTPSGATGSPGASPGTSSTGSPGTPGSGTASSSPGSSTPSTAEAAGCGTAEAAGATGSPGSSTPSGATGSPGSSTPSGATGSPGSSPSASTGTGPGASPGTSSTGSPGASPGTSSTGSPGTPGSGTASSSPGASPGTSSTGSPGASPGTSSTGSPGASPGTSSTGSPGASPGTSSTGSPGTPGSGTASSSPGSSTPSGATGSPGTPGSGTASSSPGSSTPSGATGSPGTPGSGTASSSPGSSTPSGATGSPGSSTPSGATGSPGSSPSASTGTGPGSSPSASTGTGPGASPGTSSTGSPGTPGSGTASSSPGSSTPSGATGSPGSSPSASTGTGPGSSPSASTGTGPGASPGTSSTGSPGASPGTSSTGSPGSSTPSGATGSPGSSPSASTGTGPGASPGTSSTGSPGSSPSASTGTGPGTPGSGTASSSPGSSTPSGATGSPGSSTPSGATGSPGASPGTSSTGSPR

SEQ ID NO: 279 - protein, 892 aa, synthetic construct
  REGION 1..892: note = Description of Artificial Sequence: Synthetic polypeptide
AGASPGTSSTGSPGSSPSASTGTGPGSSPSASTGTGPGTPGSGTASSSPGSSTPSGATGSPGSSPSASTGTGPGASPGTSSTGSPGTPGSGTASSSPGSSTPSGATGSPGTPGSGTASSSPGASPGTSSTGSPGASPGTSSTGSPGTPGSGTASSSPGSSTPSGATGSPGASPGTSSTGSPGTPGSGTASSSPGSSTPSGATGSPGSSPSASTGTGPGSSPSASTGTGPGSSTPSGATGSPGSSTPSGATGSPGASPGTSSTGSPGASPGTSSTGSPGASPGTSSTGSPGTPGSGTASSSPGASPGTSSTGSPGASPGTSSTGSPGASPGTSSTGSPGSSPSASTGTGPGTPGSGTASSSPGASPGTSSTGSPGASPGTSSTGSPGASPGTSSTGSPGSSTPSGATGSPGSSTPSGATGSPGASPGTSSTGSPTAEAAGCGTAEAAGTPGSGTASSSPGSSTPSGATGSPGSSTPSGATGSPGSSTPSGATGSPGSSPSASTGTGPGASPGTSSTGSPGASPGTSSTGSPGTPGSGTASSSPGASPGTSSTGSPGASPGTSSTGSPGASPGTSSTGSPGASPGTSSTGSPGTPGSGTASSSPGSSTPSGATGSPGTPGSGTASSSPGSSTPSGATGSPGTPGSGTASSSPGSSTPSGATGSPGSSTPSGATGSPGSSPSASTGTGPGSSPSASTGTGPGASPGTSSTGSPGTPGSGTASSSPGSSTPSGATGSPGSSPSASTGTGPGSSPSASTGTGPGASPGTSSTGSPGASPGTSSTGSPGSSTPSGATGSPGSSPSASTGTGPGASPGTSSTGSPGSSPSASTGTGPGTPGSGTASSSPGSSTPSGATGSPGSSTPSGATGSPGASPGTSSTGSPTAEAAGCGTAEAAR

SEQ ID NO: 280 - protein, 871 aa, synthetic construct
  REGION 1..871: note = Description of Artificial Sequence: Synthetic polypeptide
AGASPGTSSTGSPGSSPSASTGTGPGSSPSASTGTGPGTPGSGTASSSPGSSTPSGATGSPGSSPSASTGTGPGASPGTSSTGSPGTPGSGTASSSPGSSTPSGATGSPGTPGSGTASSSPGASPGTSSTGSPGASPGTSSTGSPGTPGSGTASSSPGSSTPSGATGSPGASPGTSSTGSPGTPGSGTASSSPGSSTPSGATGSPGSSPSASTGTGPGSSPSASTGTGPGSSTPSGATGSPGSSTPSGATGSPGASPGTSSTGSPGASPGTSSTGSPGASPGTSSTGSPGTPGSGTASSSPGASPGTSSTGSPGASPGTSSTGSPGASPGTSSTGSPGSSPSASTGTGPGTPGSGTASSSPGASPGTSSTGSPGASPGTSSTGSPGASPGTSSTGSPGSSTPSGATGSPGSSTPSGATGSPGASPGTSSTGSPGGKPGGTPGSGTASSSPGSSTPSGATGSPGSSTPSGATGSPGSSTPSGATGSPGSSPSASTGTGPGASPGTSSTGSPGASPGTSSTGSPGTPGSGTASSSPGASPGTSSTGSPGASPGTSSTGSPGASPGTSSTGSPGASPGTSSTGSPGTPGSGTASSSPGSSTPSGATGSPGTPGSGTASSSPGSSTPSGATGSPGTPGSGTASSSPGSSTPSGATGSPGSSTPSGATGSPGSSPSASTGTGPGSSPSASTGTGPGASPGTSSTGSPGTPGSGTASSSPGSSTPSGATGSPGSSPSASTGTGPGSSPSASTGTGPGASPGTSSTGSPGASPGTSSTGSPGSSTPSGATGSPGSSPSASTGTGPGASPGTSSTGSPGSSPSASTGTGPGTPGSGTASSSPGSSTPSGATGSPGSSTPSGATGSPGASPGTSSTGSPR

SEQ ID NO: 281 - protein, 876 aa, synthetic construct
  REGION 1..876: note = Description of Artificial Sequence: Synthetic polypeptide
AGGKPGGASPGTSSTGSPGSSPSASTGTGPGSSPSASTGTGPGTPGSGTASSSPGSSTPSGATGSPGSSPSASTGTGPGASPGTSSTGSPGTPGSGTASSSPGSSTPSGATGSPGTPGSGTASSSPGASPGTSSTGSPGASPGTSSTGSPGTPGSGTASSSPGSSTPSGATGSPGASPGTSSTGSPGTPGSGTASSSPGSSTPSGATGSPGSSPSASTGTGPGSSPSASTGTGPGSSTPSGATGSPGSSTPSGATGSPGASPGTSSTGSPGASPGTSSTGSPGASPGTSSTGSPGTPGSGTASSSPGASPGTSSTGSPGASPGTSSTGSPGASPGTSSTGSPGSSPSASTGTGPGTPGSGTASSSPGASPGTSSTGSPGASPGTSSTGSPGASPGTSSTGSPGSSTPSGATGSPGSSTPSGATGSPGASPGTSSTGSPGTPGSGTASSSPGSSTPSGATGSPGSSTPSGATGSPGSSTPSGATGSPGSSPSASTGTGPGASPGTSSTGSPGASPGTSSTGSPGTPGSGTASSSPGASPGTSSTGSPGASPGTSSTGSPGASPGTSSTGSPGASPGTSSTGSPGTPGSGTASSSPGSSTPSGATGSPGTPGSGTASSSPGSSTPSGATGSPGTPGSGTASSSPGSSTPSGATGSPGSSTPSGATGSPGSSPSASTGTGPGSSPSASTGTGPGASPGTSSTGSPGTPGSGTASSSPGSSTPSGATGSPGSSPSASTGTGPGSSPSASTGTGPGASPGTSSTGSPGASPGTSSTGSPGSSTPSGATGSPGSSPSASTGTGPGASPGTSSTGSPGSSPSASTGTGPGTPGSGTASSSPGSSTPSGATGSPGSSTPSGATGSPGASPGTSSTGSPGGKPGR

SEQ ID NO: 282 - protein, 881 aa, synthetic construct
  REGION 1..881: note = Description of Artificial Sequence: Synthetic polypeptide
AGGKPGGASPGTSSTGSPGSSPSASTGTGPGSSPSASTGTGPGTPGSGTASSSPGSSTPSGATGSPGSSPSASTGTGPGASPGTSSTGSPGTPGSGTASSSPGSSTPSGATGSPGTPGSGTASSSPGASPGTSSTGSPGASPGTSSTGSPGTPGSGTASSSPGSSTPSGATGSPGASPGTSSTGSPGTPGSGTASSSPGSSTPSGATGSPGSSPSASTGTGPGSSPSASTGTGPGSSTPSGATGSPGSSTPSGATGSPGASPGTSSTGSPGASPGTSSTGSPGASPGTSSTGSPGTPGSGTASSSPGASPGTSSTGSPGASPGTSSTGSPGASPGTSSTGSPGSSPSASTGTGPGTPGSGTASSSPGASPGTSSTGSPGASPGTSSTGSPGASPGTSSTGSPGSSTPSGATGSPGSSTPSGATGSPGASPGTSSTGSPGGKPGGTPGSGTASSSPGSSTPSGATGSPGSSTPSGATGSPGSSTPSGATGSPGSSPSASTGTGPGASPGTSSTGSPGASPGTSSTGSPGTPGSGTASSSPGASPGTSSTGSPGASPGTSSTGSPGASPGTSSTGSPGASPGTSSTGSPGTPGSGTASSSPGSSTPSGATGSPGTPGSGTASSSPGSSTPSGATGSPGTPGSGTASSSPGSSTPSGATGSPGSSTPSGATGSPGSSPSASTGTGPGSSPSASTGTGPGASPGTSSTGSPGTPGSGTASSSPGSSTPSGATGSPGSSPSASTGTGPGSSPSASTGTGPGASPGTSSTGSPGASPGTSSTGSPGSSTPSGATGSPGSSPSASTGTGPGASPGTSSTGSPGSSPSASTGTGPGTPGSGTASSSPGSSTPSGATGSPGSSTPSGATGSPGASPGTSSTGSPGGKPGR

SEQ ID NO: 283 - protein, 886 aa, synthetic construct
  REGION 1..886: note = Description of Artificial Sequence: Synthetic polypeptide
AGGKPGGASPGTSSTGSPGSSPSASTGTGPGSSPSASTGTGPGTPGSGTASSSPGSSTPSGATGSPGSSPSASTGTGPGASPGTSSTGSPGTPGSGTASSSPGSSTPSGATGSPGTPGSGTASSSPGASPGTSSTGSPGASPGTSSTGSPGTPGSGTASSSPGSSTPSGATGSPGASPGTSSTGSPGTPGSGTASSSPGSSTPSGATGSPGSSPSASTGTGPGSSPSASTGTGPGSSTPSGATGSPGSSTPSGATGSPGASPGTSSTGSPGASPGTSSTGSPGASPGTSSTGSPGGKPGGTPGSGTASSSPGASPGTSSTGSPGASPGTSSTGSPGASPGTSSTGSPGSSPSASTGTGPGTPGSGTASSSPGASPGTSSTGSPGASPGTSSTGSPGASPGTSSTGSPGSSTPSGATGSPGSSTPSGATGSPGASPGTSSTGSPGTPGSGTASSSPGSSTPSGATGSPGSSTPSGATGSPGSSTPSGATGSPGSSPSASTGTGPGASPGTSSTGSPGASPGTSSTGSPGTPGSGTASSSPGASPGTSSTGSPGASPGTSSTGSPGASPGTSSTGSPGASPGTSSTGSPGGKPGGTPGSGTASSSPGSSTPSGATGSPGTPGSGTASSSPGSSTPSGATGSPGTPGSGTASSSPGSSTPSGATGSPGSSTPSGATGSPGSSPSASTGTGPGSSPSASTGTGPGASPGTSSTGSPGTPGSGTASSSPGSSTPSGATGSPGSSPSASTGTGPGSSPSASTGTGPGASPGTSSTGSPGASPGTSSTGSPGSSTPSGATGSPGSSPSASTGTGPGASPGTSSTGSPGSSPSASTGTGPGTPGSGTASSSPGSSTPSGATGSPGSSTPSGATGSPGASPGTSSTGSPGGKPGR

SEQ ID NO: 284 - protein, 891 aa, synthetic construct
  REGION 1..891: note = Description of Artificial Sequence: Synthetic polypeptide
AGGKPGGASPGTSSTGSPGSSPSASTGTGPGSSPSASTGTGPGTPGSGTASSSPGSSTPSGATGSPGSSPSASTGTGPGASPGTSSTGSPGTPGSGTASSSPGSSTPSGATGSPGTPGSGTASSSPGASPGTSSTGSPGASPGTSSTGSPGTPGSGTASSSPGSSTPSGATGSPGASPGTSSTGSPGTPGSGTASSSPGSSTPSGATGSPGSSPSASTGTGPGGKPGGSSPSASTGTGPGSSTPSGATGSPGSSTPSGATGSPGASPGTSSTGSPGASPGTSSTGSPGASPGTSSTGSPGTPGSGTASSSPGASPGTSSTGSPGASPGTSSTGSPGASPGTSSTGSPGSSPSASTGTGPGTPGSGTASSSPGASPGTSSTGSPGASPGTSSTGSPGASPGTSSTGSPGSSTPSGATGSPGSSTPSGATGSPGASPGTSSTGSPGGKPGGTPGSGTASSSPGSSTPSGATGSPGSSTPSGATGSPGSSTPSGATGSPGSSPSASTGTGPGASPGTSSTGSPGASPGTSSTGSPGTPGSGTASSSPGASPGTSSTGSPGASPGTSSTGSPGASPGTSSTGSPGASPGTSSTGSPGTPGSGTASSSPGSSTPSGATGSPGTPGSGTASSSPGSSTPSGATGSPGTPGSGTASSSPGSSTPSGATGSPGGKPGGSSTPSGATGSPGSSPSASTGTGPGSSPSASTGTGPGASPGTSSTGSPGTPGSGTASSSPGSSTPSGATGSPGSSPSASTGTGPGSSPSASTGTGPGASPGTSSTGSPGASPGTSSTGSPGSSTPSGATGSPGSSPSASTGTGPGASPGTSSTGSPGSSPSASTGTGPGTPGSGTASSSPGSSTPSGATGSPGSSTPSGATGSPGASPGTSSTGSPGGKPGR

SEQ ID NO: 285 - protein, 896 aa, synthetic construct
  REGION 1..896: note = Description of Artificial Sequence: Synthetic polypeptide
AGGKPGGASPGTSSTGSPGSSPSASTGTGPGSSPSASTGTGPGTPGSGTASSSPGSSTPSGATGSPGSSPSASTGTGPGASPGTSSTGSPGTPGSGTASSSPGSSTPSGATGSPGTPGSGTASSSPGASPGTSSTGSPGASPGTSSTGSPGTPGSGTASSSPGSSTPSGATGSPGASPGGGKPGTSSTGSPGTPGSGTASSSPGSSTPSGATGSPGSSPSASTGTGPGSSPSASTGTGPGSSTPSGATGSPGSSTPSGATGSPGASPGTSSTGSPGASPGTSSTGSPGASPGTSSTGSPGTPGSGTASSSPGASPGTSSTGSPGASPGTSSTGSPGASPGTSSTGSPGSSPSASTGTGGKPGGPGTPGSGTASSSPGASPGTSSTGSPGASPGTSSTGSPGASPGTSSTGSPGSSTPSGATGSPGSSTPSGATGSPGASPGTSSTGSPGTPGSGTASSSPGSSTPSGATGSPGSSTPSGATGSPGSSTPSGATGSPGSSPSASTGTGPGASPGTSSTGSPGASPGTSSTGSPGTGGKPGPGSGTASSSPGASPGTSSTGSPGASPGTSSTGSPGASPGTSSTGSPGASPGTSSTGSPGTPGSGTASSSPGSSTPSGATGSPGTPGSGTASSSPGSSTPSGATGSPGTPGSGTASSSPGSSTPSGATGSPGSSTPSGATGSPGSSPSASTGTGPGSSPSASTGTGPGASPGTSGGKPGSTGSPGTPGSGTASSSPGSSTPSGATGSPGSSPSASTGTGPGSSPSASTGTGPGASPGTSSTGSPGASPGTSSTGSPGSSTPSGATGSPGSSPSASTGTGPGASPGTSSTGSPGSSPSASTGTGPGTPGSGTASSSPGSSTPSGATGSPGSSTPSGATGSPGASPGTSSTGSPGGKPGR

SEQ ID NO: 286 - protein, 901 aa, synthetic construct
  REGION 1..901: note = Description of Artificial Sequence: Synthetic polypeptide
AGGKPGGASPGTSSTGSPGSSPSASTGTGPGSSPSASTGTGPGTPGSGTASSSPGSSTPSGATGSPGSSPSASTGTGPGASPGTSSTGSPGTPGSGTASSSPGSSTPSGATGSPGTPGSGTASSSPGASPGTSSTGSPGASPGTSSTGSPGGKPGGTPGSGTASSSPGSSTPSGATGSPGASPGTSSTGSPGTPGSGTASSSPGSSTPSGATGSPGSSPSASTGTGPGSSPSASTGTGPGSSTPSGATGSPGSSTPSGATGSPGASPGTSSTGSPGASPGTSSTGSPGASPGTSSTGSPGGKPGGTPGSGTASSSPGASPGTSSTGSPGASPGTSSTGSPGASPGTSSTGSPGSSPSASTGTGPGTPGSGTASSSPGASPGTSSTGSPGASPGTSSTGSPGASPGTSSTGSPGSSTPSGATGSPGSSTPSGATGSPGASPGTSSTGSPGGKPGGTPGSGTASSSPGSSTPSGATGSPGSSTPSGATGSPGSSTPSGATGSPGSSPSASTGTGPGASPGTSSTGSPGASPGTSSTGSPGTPGSGTASSSPGASPGTSSTGSPGASPGTSSTGSPGASPGTSSTGSPGASPGTSSTGSPGGKPGGTPGSGTASSSPGSSTPSGATGSPGTPGSGTASSSPGSSTPSGATGSPGTPGSGTASSSPGSSTPSGATGSPGSSTPSGATGSPGSSPSASTGTGPGSSPSASTGTGPGASPGTSSTGSPGTPGSGTASSSPGSSTPSGATGSPGGKPGGSSPSASTGTGPGSSPSASTGTGPGASPGTSSTGSPGASPGTSSTGSPGSSTPSGATGSPGSSPSASTGTGPGASPGTSSTGSPGSSPSASTGTGPGTPGSGTASSSPGSSTPSGATGSPGSSTPSGATGSPGASPGTSSTGSPGGKPGR

SEQ ID NO: 287 - protein, 906 aa, synthetic construct
  REGION 1..906: note = Description of Artificial Sequence: Synthetic polypeptide
AGGKPGGASPGTSSTGSPGSSPSASTGTGPGSSPSASTGTGPGTPGSGTASSSPGSSTPSGATGSPGSSPSASTGTGPGASPGTSSTGSPGTPGSGTASSSPGSSTPSGATGSPGTPGSGTASSSPGASGGKPGPGTSSTGSPGASPGTSSTGSPGTPGSGTASSSPGSSTPSGATGSPGASPGTSSTGSPGTPGSGTASSSPGSSTPSGATGSPGSSPSASTGTGPGSSPSASTGTGPGSSTPSGATGSPGSSTPSGGGKPGATGSPGASPGTSSTGSPGASPGTSSTGSPGASPGTSSTGSPGTPGSGTASSSPGASPGTSSTGSPGASPGTSSTGSPGASPGTSSTGSPGSSPSASTGTGPGTPGSGTASSSPGASPGTSSTGGGKPGSPGASPGTSSTGSPGASPGTSSTGSPGSSTPSGATGSPGSSTPSGATGSPGASPGTSSTGSPGTPGSGTASSSPGSSTPSGATGSPGSSTPSGATGSPGSSTPSGATGSPGSSPSASTGTGPGAGGKPGSPGTSSTGSPGASPGTSSTGSPGTPGSGTASSSPGASPGTSSTGSPGASPGTSSTGSPGASPGTSSTGSPGASPGTSSTGSPGTPGSGTASSSPGSSTPSGATGSPGTPGSGTASSSPGSSTPGGKPGSGATGSPGTPGSGTASSSPGSSTPSGATGSPGSSTPSGATGSPGSSPSASTGTGPGSSPSASTGTGPGASPGTSSTGSPGTPGSGTASSSPGSSTPSGATGSPGSSPSASTGTGPGSSPSASTGGGKPGTGPGASPGTSSTGSPGASPGTSSTGSPGSSTPSGATGSPGSSPSASTGTGPGASPGTSSTGSPGSSPSASTGTGPGTPGSGTASSSPGSSTPSGATGSPGSSTPSGATGSPGASPGTSSTGSPGGKPGR

SEQ ID NO: 288 - protein, 871 aa, synthetic construct
  REGION 1..871: note = Description of Artificial Sequence: Synthetic polypeptide
AGGKPGGASPGTSSTGSPGSSPSASTGTGPGSSPSASTGTGPGTPGSGTASSSPGSSTPSGATGSPGSSPSASTGTGPGASPGTSSTGSPGTPGSGTASSSPGSSTPSGATGSPGTPGSGTASSSPGASPGTSSTGSPGASPGTSSTGSPGTPGSGTASSSPGSSTPSGATGSPGASPGTSSTGSPGTPGSGTASSSPGSSTPSGATGSPGSSPSASTGTGPGSSPSASTGTGPGSSTPSGATGSPGSSTPSGATGSPGASPGTSSTGSPGASPGTSSTGSPGASPGTSSTGSPGTPGSGTASSSPGASPGTSSTGSPGASPGTSSTGSPGASPGTSSTGSPGSSPSASTGTGPGTPGSGTASSSPGASPGTSSTGSPGASPGTSSTGSPGASPGTSSTGSPGSSTPSGATGSPGSSTPSGATGSPGASPGTSSTGSPGTPGSGTASSSPGSSTPSGATGSPGSSTPSGATGSPGSSTPSGATGSPGSSPSASTGTGPGASPGTSSTGSPGASPGTSSTGSPGTPGSGTASSSPGASPGTSSTGSPGASPGTSSTGSPGASPGTSSTGSPGASPGTSSTGSPGTPGSGTASSSPGSSTPSGATGSPGTPGSGTASSSPGSSTPSGATGSPGTPGSGTASSSPGSSTPSGATGSPGSSTPSGATGSPGSSPSASTGTGPGSSPSASTGTGPGASPGTSSTGSPGTPGSGTASSSPGSSTPSGATGSPGSSPSASTGTGPGSSPSASTGTGPGASPGTSSTGSPGASPGTSSTGSPGSSTPSGATGSPGSSPSASTGTGPGASPGTSSTGSPGSSPSASTGTGPGTPGSGTASSSPGSSTPSGATGSPGSSTPSGATGSPGASPGTSSTGSPR

SEQ ID NO: 289 - protein, 871 aa, synthetic construct
  REGION 1..871: note = Description of Artificial Sequence: Synthetic polypeptide
AGASPGTSSTGSPGSSPSASTGTGPGSSPSASTGTGPGTPGSGTASSSPGSSTPSGATGSPGSSPSASTGTGPGASPGTSSTGSPGTPGSGTASSSPGSSTPSGATGSPGTPGSGTASSSPGASPGTSSTGSPGASPGTSSTGSPGTPGSGTASSSPGSSTPSGATGSPGASPGTSSTGSPGTPGSGTASSSPGSSTPSGATGSPGSSPSASTGTGPGSSPSASTGTGPGSSTPSGATGSPGSSTPSGATGSPGASPGTSSTGSPGASPGTSSTGSPGASPGTSSTGSPGTPGSGTASSSPGASPGTSSTGSPGASPGTSSTGSPGASPGTSSTGSPGSSPSASTGTGPGTPGSGTASSSPGASPGTSSTGSPGASPGTSSTGSPGASPGTSSTGSPGSSTPSGATGSPGSSTPSGATGSPGASPGTSSTGSPGTPGSGTASSSPGSSTPSGATGSPGSSTPSGATGSPGSSTPSGATGSPGSSPSASTGTGPGASPGTSSTGSPGASPGTSSTGSPGTPGSGTASSSPGASPGTSSTGSPGASPGTSSTGSPGASPGTSSTGSPGASPGTSSTGSPGTPGSGTASSSPGSSTPSGATGSPGTPGSGTASSSPGSSTPSGATGSPGTPGSGTASSSPGSSTPSGATGSPGSSTPSGATGSPGSSPSASTGTGPGSSPSASTGTGPGASPGTSSTGSPGTPGSGTASSSPGSSTPSGATGSPGSSPSASTGTGPGSSPSASTGTGPGASPGTSSTGSPGASPGTSSTGSPGSSTPSGATGSPGSSPSASTGTGPGASPGTSSTGSPGSSPSASTGTGPGTPGSGTASSSPGSSTPSGATGSPGSSTPSGATGSPGASPGTSSTGSPGGKPGR

SEQ ID NO: 290 - protein, 876 aa, synthetic construct
  REGION 1..876: note = Description of Artificial Sequence: Synthetic polypeptide
AGGKPGGASPGTSSTGSPGSSPSASTGTGPGSSPSASTGTGPGTPGSGTASSSPGSSTPSGATGSPGSSPSASTGTGPGASPGTSSTGSPGTPGSGTASSSPGSSTPSGATGSPGTPGSGTASSSPGASPGTSSTGSPGASPGTSSTGSPGTPGSGTASSSPGSSTPSGATGSPGASPGTSSTGSPGTPGSGTASSSPGSSTPSGATGSPGSSPSASTGTGPGSSPSASTGTGPGSSTPSGATGSPGSSTPSGATGSPGASPGTSSTGSPGASPGTSSTGSPGASPGTSSTGSPGTPGSGTASSSPGASPGTSSTGSPGASPGTSSTGSPGASPGTSSTGSPGSSPSASTGTGPGTPGSGTASSSPGASPGTSSTGSPGASPGTSSTGSPGASPGTSSTGSPGSSTPSGATGSPGSSTPSGATGSPGASPGTSSTGSPGGKPGGTPGSGTASSSPGSSTPSGATGSPGSSTPSGATGSPGSSTPSGATGSPGSSPSASTGTGPGASPGTSSTGSPGASPGTSSTGSPGTPGSGTASSSPGASPGTSSTGSPGASPGTSSTGSPGASPGTSSTGSPGASPGTSSTGSPGTPGSGTASSSPGSSTPSGATGSPGTPGSGTASSSPGSSTPSGATGSPGTPGSGTASSSPGSSTPSGATGSPGSSTPSGATGSPGSSPSASTGTGPGSSPSASTGTGPGASPGTSSTGSPGTPGSGTASSSPGSSTPSGATGSPGSSPSASTGTGPGSSPSASTGTGPGASPGTSSTGSPGASPGTSSTGSPGSSTPSGATGSPGSSPSASTGTGPGASPGTSSTGSPGSSPSASTGTGPGTPGSGTASSSPGSSTPSGATGSPGSSTPSGATGSPGASPGTSSTGSPR

SEQ ID NO: 291 - protein, 876 aa, synthetic construct
  REGION 1..876: note = Description of Artificial Sequence: Synthetic polypeptide
AGASPGTSSTGSPGSSPSASTGTGPGSSPSASTGTGPGTPGSGTASSSPGSSTPSGATGSPGSSPSASTGTGPGASPGTSSTGSPGTPGSGTASSSPGSSTPSGATGSPGTPGSGTASSSPGASPGTSSTGSPGASPGTSSTGSPGTPGSGTASSSPGSSTPSGATGSPGASPGTSSTGSPGTPGSGTASSSPGSSTPSGATGSPGSSPSASTGTGPGSSPSASTGTGPGSSTPSGATGSPGSSTPSGATGSPGASPGTSSTGSPGASPGTSSTGSPGASPGTSSTGSPGTPGSGTASSSPGASPGTSSTGSPGASPGTSSTGSPGASPGTSSTGSPGSSPSASTGTGPGTPGSGTASSSPGASPGTSSTGSPGASPGTSSTGSPGASPGTSSTGSPGSSTGGKPGPSGATGSPGSSTPSGATGSPGASPGTSSTGSPGTPGSGTASSSPGSSTPSGGKPGGATGSPGSSTPSGATGSPGSSTPSGATGSPGSSPSASTGTGPGASPGTSSTGSPGASPGTSSTGSPGTPGSGTASSSPGASPGTSSTGSPGASPGTSSTGSPGASPGTSSTGSPGASPGTSSTGSPGTPGSGTASSSPGSSTPSGATGSPGTPGSGTASSSPGSSTPSGATGSPGTPGSGTASSSPGSSTPSGATGSPGSSTPSGATGSPGSSPSASTGTGPGSSPSASTGTGPGASPGTSSTGSPGTPGSGTASSSPGSSTPSGATGSPGSSPSASTGTGPGSSPSASTGTGPGASPGTSSTGSPGASPGTSSTGSPGSSTPSGATGSPGSSPSASTGTGPGASPGTSSTGSPGSSPSASTGTGPGTPGSGTASSSPGSSTPSGATGSPGSSTPSGATGSPGASPGTSSTGSPR

SEQ ID NO: 292 - protein, 876 aa, synthetic construct
  REGION 1..876: note = Description of Artificial Sequence: Synthetic polypeptide
AGASPGTSSTGSPGSSPSASTGTGPGSSPSASTGTGPGTPGSGTASSSPGSSTPSGATGSPGSSPSASTGTGPGASPGTSSTGSPGTPGSGTASSSPGSSTPSGATGSPGTPGSGTASSSPGASPGTSSTGSPGASPGTSSTGSPGTPGSGTASSSPGSSTPSGATGSPGASPGTSSTGSPGTPGSGTASSSPGSSTPSGATGSPGSSPSASTGTGPGSSPSASTGTGPGSSTPSGATGSPGSSTPSGATGSPGASPGTSSTGSPGASPGTSSTGSPGASPGTSSTGSPGTPGSGTASSSPGASPGTSSTGSPGASPGTSSTGSPGASPGTSSTGSPGSSPSASTGTGPGTPGSGTASSSPGASPGTSSTGSPGASPGTSSTGSPGASPGTSSTGSPGSSTPSGATGSPGSSTPSGATGSPGASPGTSSTGSPGGKPGGTPGSGTASSSPGSSTPSGATGSPGSSTPSGATGSPGSSTPSGATGSPGSSPSASTGTGPGASPGTSSTGSPGASPGTSSTGSPGTPGSGTASSSPGASPGTSSTGSPGASPGTSSTGSPGASPGTSSTGSPGASPGTSSTGSPGTPGSGTASSSPGSSTPSGATGSPGTPGSGTASSSPGSSTPSGATGSPGTPGSGTASSSPGSSTPSGATGSPGSSTPSGATGSPGSSPSASTGTGPGSSPSASTGTGPGASPGTSSTGSPGTPGSGTASSSPGSSTPSGATGSPGSSPSASTGTGPGSSPSASTGTGPGASPGTSSTGSPGASPGTSSTGSPGSSTPSGATGSPGSSPSASTGTGPGASPGTSSTGSPGSSPSASTGTGPGTPGSGTASSSPGSSTPSGATGSPGSSTPSGATGSPGASPGTSSTGSPGGKPGR

SEQ ID NO: 293 - protein, 888 aa, synthetic construct
  REGION 1..888: note = Description of Artificial Sequence: Synthetic polypeptide
AEATTAAGGAGASPGTSSTGSPGSSPSASTGTGPGSSPSASTGTGPGTPGSGTASSSPGSSTPSGATGSPGSSPSASTGTGPGASPGTSSTGSPGTPGSGTASSSPGSSTPSGATGSPGTPGSGTASSSPGASPGTSSTGSPGASPGTSSTGSPGTPGSGTASSSPGSSTPSGATGSPGASPGTSSTGSPGTPGSGTASSSPGSSTPSGATGSPGSSPSASTGTGPGSSPSASTGTGPGSSTPSGATGSPGSSTPSGATGSPGASPGTSSTGSPGASPGTSSTGSPGASPGTSSTGSPGTPGSGTASSSPGASPGTSSTGSPGASPGTSSTGSPGASPGTSSTGSPGSSPSASTGTGPGTPGSGTASSSPGASPGTSSTGSPGASPGTSSTGSPGASPGTSSTGSPGSSTPSGATGSPGSSTPSGATGSPGASPGTSSTGSPTAEAAGCGTAEAAGTPGSGTASSSPGSSTPSGATGSPGSSTPSGATGSPGSSTPSGATGSPGSSPSASTGTGPGASPGTSSTGSPGASPGTSSTGSPGTPGSGTASSSPGASPGTSSTGSPGASPGTSSTGSPGASPGTSSTGSPGASPGTSSTGSPGTPGSGTASSSPGSSTPSGATGSPGTPGSGTASSSPGSSTPSGATGSPGTPGSGTASSSPGSSTPSGATGSPGSSTPSGATGSPGSSPSASTGTGPGSSPSASTGTGPGASPGTSSTGSPGTPGSGTASSSPGSSTPSGATGSPGSSPSASTGTGPGSSPSASTGTGPGASPGTSSTGSPGASPGTSSTGSPGSSTPSGATGSPGSSPSASTGTGPGASPGTSSTGSPGSSPSASTGTGPGTPGSGTASSSPGSSTPSGATGSPGSSTPSGATGSPGASPGTSSTGSPR

SEQ ID NO: 294 - protein, 901 aa, synthetic construct
  REGION 1..901: note = Description of Artificial Sequence: Synthetic polypeptide
AEATTAAGGATAEAAGCGTAEAAGASPGTSSTGSPGSSPSASTGTGPGSSPSASTGTGPGTPGSGTASSSPGSSTPSGATGSPGSSPSASTGTGPGASPGTSSTGSPGTPGSGTASSSPGSSTPSGATGSPGTPGSGTASSSPGASPGTSSTGSPGASPGTSSTGSPGTPGSGTASSSPGSSTPSGATGSPGASPGTSSTGSPGTPGSGTASSSPGSSTPSGATGSPGSSPSASTGTGPGSSPSASTGTGPGSSTPSGATGSPGSSTPSGATGSPGASPGTSSTGSPGASPGTSSTGSPGASPGTSSTGSPGTPGSGTASSSPGASPGTSSTGSPGASPGTSSTGSPGASPGTSSTGSPGSSPSASTGTGPGTPGSGTASSSPGASPGTSSTGSPGASPGTSSTGSPGASPGTSSTGSPGSSTPSGATGSPGSSTPSGATGSPGASPGTSSTGSPGTPGSGTASSSPGSSTPSGATGSPGSSTPSGATGSPGSSTPSGATGSPGSSPSASTGTGPGASPGTSSTGSPGASPGTSSTGSPGTPGSGTASSSPGASPGTSSTGSPGASPGTSSTGSPGASPGTSSTGSPGASPGTSSTGSPGTPGSGTASSSPGSSTPSGATGSPGTPGSGTASSSPGSSTPSGATGSPGTPGSGTASSSPGSSTPSGATGSPGSSTPSGATGSPGSSPSASTGTGPGSSPSASTGTGPGASPGTSSTGSPGTPGSGTASSSPGSSTPSGATGSPGSSPSASTGTGPGSSPSASTGTGPGASPGTSSTGSPGASPGTSSTGSPGSSTPSGATGSPGSSPSASTGTGPGASPGTSSTGSPGSSPSASTGTGPGTPGSGTASSSPGSSTPSGATGSPGSSTPSGATGSPGASPGTSSTGSPTAEAAGCGTAEAAR

SEQ ID NO: 295 - protein, 914 aa, synthetic construct
  REGION 1..914: note = Description of Artificial Sequence: Synthetic polypeptide
AEATTAAGGATAEAAGCGTAEAAGASPGTSSTGSPGSSPSASTGTGPGSSPSASTGTGPGTPGSGTASSSPGSSTPSGATGSPGSSPSASTGTGPGASPGTSSTGSPGTPGSGTASSSPGSSTPSGATGSPGTPGSGTASSSPGASPGTSSTGSPGASPGTSSTGSPGTPGSGTASSSPGSSTPSGATGSPGASPGTSSTGSPGTPGSGTASSSPGSSTPSGATGSPGSSPSASTGTGPGSSPSASTGTGPGSSTPSGATGSPGSSTPSGATGSPGASPGTSSTGSPGASPGTSSTGSPGASPGTSSTGSPGTPGSGTASSSPGASPGTSSTGSPGASPGTSSTGSPGASPGTSSTGSPGSSPSASTGTGPGTPGSGTASSSPGASPGTSSTGSPGASPGTSSTGSPGASPGTSSTGSPGSSTPSGATGSPGSSTPSGATGSPGASPGTSSTGSPTAEAAGCGTAEAAGTPGSGTASSSPGSSTPSGATGSPGSSTPSGATGSPGSSTPSGATGSPGSSPSASTGTGPGASPGTSSTGSPGASPGTSSTGSPGTPGSGTASSSPGASPGTSSTGSPGASPGTSSTGSPGASPGTSSTGSPGASPGTSSTGSPGTPGSGTASSSPGSSTPSGATGSPGTPGSGTASSSPGSSTPSGATGSPGTPGSGTASSSPGSSTPSGATGSPGSSTPSGATGSPGSSPSASTGTGPGSSPSASTGTGPGASPGTSSTGSPGTPGSGTASSSPGSSTPSGATGSPGSSPSASTGTGPGSSPSASTGTGPGASPGTSSTGSPGASPGTSSTGSPGSSTPSGATGSPGSSPSASTGTGPGASPGTSSTGSPGSSPSASTGTGPGTPGSGTASSSPGSSTPSGATGSPGSSTPSGATGSPGASPGTSSTGSPTAEAAGCGTAEAAR

SEQ ID NO: 296 - protein, 927 aa, synthetic construct
  REGION 1..927: note = Description of Artificial Sequence: Synthetic polypeptide
AEATTAAGGATAEAAGCGTAEAAGASPGTSSTGSPGSSPSASTGTGPGSSPSASTGTGPGTPGSGTASSSPGSSTPSGATGSPGSSPSASTGTGPGASPGTSSTGSPGTPGSGTASSSPGSSTPSGATGSPGTPGSGTASSSPGASPGTSSTGSPGASPGTSSTGSPGTPGSGTASSSPGSSTPSGATGSPGASPGTSSTGSPGTPGSGTASSSPGSSTPSGATGSPGSSPSASTGTGPGSSPSASTGTGPGSSTPSGATGSPGSSTPSGATGSPGASPGTSSTGSPGASPGTSSTGSPGASPGTSSTGSPTAEAAGCGTAEAAGTPGSGTASSSPGASPGTSSTGSPGASPGTSSTGSPGASPGTSSTGSPGSSPSASTGTGPGTPGSGTASSSPGASPGTSSTGSPGASPGTSSTGSPGASPGTSSTGSPGSSTPSGATGSPGSSTPSGATGSPGASPGTSSTGSPGTPGSGTASSSPGSSTPSGATGSPGSSTPSGATGSPGSSTPSGATGSPGSSPSASTGTGPGASPGTSSTGSPGASPGTSSTGSPGTPGSGTASSSPGASPGTSSTGSPGASPGTSSTGSPGASPGTSSTGSPGASPGTSSTGSPTAEAAGCGTAEAAGTPGSGTASSSPGSSTPSGATGSPGTPGSGTASSSPGSSTPSGATGSPGTPGSGTASSSPGSSTPSGATGSPGSSTPSGATGSPGSSPSASTGTGPGSSPSASTGTGPGASPGTSSTGSPGTPGSGTASSSPGSSTPSGATGSPGSSPSASTGTGPGSSPSASTGTGPGASPGTSSTGSPGASPGTSSTGSPGSSTPSGATGSPGSSPSASTGTGPGASPGTSSTGSPGSSPSASTGTGPGTPGSGTASSSPGSSTPSGATGSPGSSTPSGATGSPGASPGTSSTGSPTAEAAGCGTAEAAR

SEQ ID NO: 297 - protein, 890 aa, synthetic construct
  REGION 1..890: note = Description of Artificial Sequence: Synthetic polypeptide
ATGTATSEGSPEGASPGTSSTGSPGSSPSASTGTGPGSSPSASTGTGPGTPGSGTASSSPGSSTPSGATGSPGSSPSASTGTGPGASPGTSSTGSPGTPGSGTASSSPGSSTPSGATGSPGTPGSGTASSSPGASPGTSSTGSPGASPGTSSTGSPGTPGSGTASSSPGSSTPSGATGSPGASPGTSSTGSPGTPGSGTASSSPGSSTPSGATGSPGSSPSASTGTGPGSSPSASTGTGPGSSTPSGATGSPGSSTPSGATGSPGASPGTSSTGSPGASPGTSSTGSPGASPGTSSTGSPGTPGSGTASSSPGASPGTSSTGSPGASPGTSSTGSPGASPGTSSTGSPGSSPSASTGTGPGTPGSGTASSSPGASPGTSSTGSPGASPGTSSTGSPGASPGTSSTGSPGSSTPSGATGSPGSSTPSGATGSPGASPGTSSTGSPTAEAAGCGTAEAAGTPGSGTASSSPGSSTPSGATGSPGSSTPSGATGSPGSSTPSGATGSPGSSPSASTGTGPGASPGTSSTGSPGASPGTSSTGSPGTPGSGTASSSPGASPGTSSTGSPGASPGTSSTGSPGASPGTSSTGSPGASPGTSSTGSPGTPGSGTASSSPGSSTPSGATGSPGTPGSGTASSSPGSSTPSGATGSPGTPGSGTASSSPGSSTPSGATGSPGSSTPSGATGSPGSSPSASTGTGPGSSPSASTGTGPGASPGTSSTGSPGTPGSGTASSSPGSSTPSGATGSPGSSPSASTGTGPGSSPSASTGTGPGASPGTSSTGSPGASPGTSSTGSPGSSTPSGATGSPGSSPSASTGTGPGASPGTSSTGSPGSSPSASTGTGPGTPGSGTASSSPGSSTPSGATGSPGSSTPSGATGSPGASPGTSSTGSPR

SEQ ID NO: 298 - protein, 903 aa, synthetic construct
  REGION 1..903: note = Description of Artificial Sequence: Synthetic polypeptide
ATGTATSEGSPETAEAAGCGTAEAAGASPGTSSTGSPGSSPSASTGTGPGSSPSASTGTGPGTPGSGTASSSPGSSTPSGATGSPGSSPSASTGTGPGASPGTSSTGSPGTPGSGTASSSPGSSTPSGATGSPGTPGSGTASSSPGASPGTSSTGSPGASPGTSSTGSPGTPGSGTASSSPGSSTPSGATGSPGASPGTSSTGSPGTPGSGTASSSPGSSTPSGATGSPGSSPSASTGTGPGSSPSASTGTGPGSSTPSGATGSPGSSTPSGATGSPGASPGTSSTGSPGASPGTSSTGSPGASPGTSSTGSPGTPGSGTASSSPGASPGTSSTGSPGASPGTSSTGSPGASPGTSSTGSPGSSPSASTGTGPGTPGSGTASSSPGASPGTSSTGSPGASPGTSSTGSPGASPGTSSTGSPGSSTPSGATGSPGSSTPSGATGSPGASPGTSSTGSPGTPGSGTASSSPGSSTPSGATGSPGSSTPSGATGSPGSSTPSGATGSPGSSPSASTGTGPGASPGTSSTGSPGASPGTSSTGSPGTPGSGTASSSPGASPGTSSTGSPGASPGTSSTGSPGASPGTSSTGSPGASPGTSSTGSPGTPGSGTASSSPGSSTPSGATGSPGTPGSGTASSSPGSSTPSGATGSPGTPGSGTASSSPGSSTPSGATGSPGSSTPSGATGSPGSSPSASTGTGPGSSPSASTGTGPGASPGTSSTGSPGTPGSGTASSSPGSSTPSGATGSPGSSPSASTGTGPGSSPSASTGTGPGASPGTSSTGSPGASPGTSSTGSPGSSTPSGATGSPGSSPSASTGTGPGASPGTSSTGSPGSSPSASTGTGPGTPGSGTASSSPGSSTPSGATGSPGSSTPSGATGSPGASPGTSSTGSPTAEAAGCGTAEAAR

SEQ ID NO: 299 - protein, 916 aa, synthetic construct
  REGION 1..916: note = Description of Artificial Sequence: Synthetic polypeptide
ATGTATSEGSPETAEAAGCGTAEAAGASPGTSSTGSPGSSPSASTGTGPGSSPSASTGTGPGTPGSGTASSSPGSSTPSGATGSPGSSPSASTGTGPGASPGTSSTGSPGTPGSGTASSSPGSSTPSGATGSPGTPGSGTASSSPGASPGTSSTGSPGASPGTSSTGSPGTPGSGTASSSPGSSTPSGATGSPGASPGTSSTGSPGTPGSGTASSSPGSSTPSGATGSPGSSPSASTGTGPGSSPSASTGTGPGSSTPSGATGSPGSSTPSGATGSPGASPGTSSTGSPGASPGTSSTGSPGASPGTSSTGSPGTPGSGTASSSPGASPGTSSTGSPGASPGTSSTGSPGASPGTSSTGSPGSSPSASTGTGPGTPGSGTASSSPGASPGTSSTGSPGASPGTSSTGSPGASPGTSSTGSPGSSTPSGATGSPGSSTPSGATGSPGASPGTSSTGSPTAEAAGCGTAEAAGTPGSGTASSSPGSSTPSGATGSPGSSTPSGATGSPGSSTPSGATGSPGSSPSASTGTGPGASPGTSSTGSPGASPGTSSTGSPGTPGSGTASSSPGASPGTSSTGSPGASPGTSSTGSPGASPGTSSTGSPGASPGTSSTGSPGTPGSGTASSSPGSSTPSGATGSPGTPGSGTASSSPGSSTPSGATGSPGTPGSGTASSSPGSSTPSGATGSPGSSTPSGATGSPGSSPSASTGTGPGSSPSASTGTGPGASPGTSSTGSPGTPGSGTASSSPGSSTPSGATGSPGSSPSASTGTGPGSSPSASTGTGPGASPGTSSTGSPGASPGTSSTGSPGSSTPSGATGSPGSSPSASTGTGPGASPGTSSTGSPGSSPSASTGTGPGTPGSGTASSSPGSSTPSGATGSPGSSTPSGATGSPGASPGTSSTGSPTAEAAGCGTAEAAR

SEQ ID NO: 300 - protein, 929 aa, synthetic construct
  REGION 1..929: note = Description of Artificial Sequence: Synthetic polypeptide
ATGTATSEGSPETAEAAGCGTAEAAGASPGTSSTGSPGSSPSASTGTGPGSSPSASTGTGPGTPGSGTASSSPGSSTPSGATGSPGSSPSASTGTGPGASPGTSSTGSPGTPGSGTASSSPGSSTPSGATGSPGTPGSGTASSSPGASPGTSSTGSPGASPGTSSTGSPGTPGSGTASSSPGSSTPSGATGSPGASPGTSSTGSPGTPGSGTASSSPGSSTPSGATGSPGSSPSASTGTGPGSSPSASTGTGPGSSTPSGATGSPGSSTPSGATGSPGASPGTSSTGSPGASPGTSSTGSPGASPGTSSTGSPTAEAAGCGTAEAAGTPGSGTASSSPGASPGTSSTGSPGASPGTSSTGSPGASPGTSSTGSPGSSPSASTGTGPGTPGSGTASSSPGASPGTSSTGSPGASPGTSSTGSPGASPGTSSTGSPGSSTPSGATGSPGSSTPSGATGSPGASPGTSSTGSPGTPGSGTASSSPGSSTPSGATGSPGSSTPSGATGSPGSSTPSGATGSPGSSPSASTGTGPGASPGTSSTGSPGASPGTSSTGSPGTPGSGTASSSPGASPGTSSTGSPGASPGTSSTGSPGASPGTSSTGSPGASPGTSSTGSPTAEAAGCGTAEAAGTPGSGTASSSPGSSTPSGATGSPGTPGSGTASSSPGSSTPSGATGSPGTPGSGTASSSPGSSTPSGATGSPGSSTPSGATGSPGSSPSASTGTGPGSSPSASTGTGPGASPGTSSTGSPGTPGSGTASSSPGSSTPSGATGSPGSSPSASTGTGPGSSPSASTGTGPGASPGTSSTGSPGASPGTSSTGSPGSSTPSGATGSPGSSPSASTGTGPGASPGTSSTGSPGSSPSASTGTGPGTPGSGTASSSPGSSTPSGATGSPGSSTPSGATGSPGASPGTSSTGSPTAEAAGCGTAEAAR

SEQ ID NO: 301 - protein, 890 aa, synthetic construct
  REGION 1..890: note = Description of Artificial Sequence: Synthetic polypeptide
EPTAATTGESAGGASPGTSSTGSPGSSPSASTGTGPGSSPSASTGTGPGTPGSGTASSSPGSSTPSGATGSPGSSPSASTGTGPGASPGTSSTGSPGTPGSGTASSSPGSSTPSGATGSPGTPGSGTASSSPGASPGTSSTGSPGASPGTSSTGSPGTPGSGTASSSPGSSTPSGATGSPGASPGTSSTGSPGTPGSGTASSSPGSSTPSGATGSPGSSPSASTGTGPGSSPSASTGTGPGSSTPSGATGSPGSSTPSGATGSPGASPGTSSTGSPGASPGTSSTGSPGASPGTSSTGSPGTPGSGTASSSPGASPGTSSTGSPGASPGTSSTGSPGASPGTSSTGSPGSSPSASTGTGPGTPGSGTASSSPGASPGTSSTGSPGASPGTSSTGSPGASPGTSSTGSPGSSTPSGATGSPGSSTPSGATGSPGASPGTSSTGSPTAEAAGCGTAEAAGTPGSGTASSSPGSSTPSGATGSPGSSTPSGATGSPGSSTPSGATGSPGSSPSASTGTGPGASPGTSSTGSPGASPGTSSTGSPGTPGSGTASSSPGASPGTSSTGSPGASPGTSSTGSPGASPGTSSTGSPGASPGTSSTGSPGTPGSGTASSSPGSSTPSGATGSPGTPGSGTASSSPGSSTPSGATGSPGTPGSGTASSSPGSSTPSGATGSPGSSTPSGATGSPGSSPSASTGTGPGSSPSASTGTGPGASPGTSSTGSPGTPGSGTASSSPGSSTPSGATGSPGSSPSASTGTGPGSSPSASTGTGPGASPGTSSTGSPGASPGTSSTGSPGSSTPSGATGSPGSSPSASTGTGPGASPGTSSTGSPGSSPSASTGTGPGTPGSGTASSSPGSSTPSGATGSPGSSTPSGATGSPGASPGTSSTGSPR

SEQ ID NO: 302 - protein, 903 aa, synthetic construct
  REGION 1..903: note = Description of Artificial Sequence: Synthetic polypeptide
EPTAATTGESAGTAEAAGCGTAEAAGASPGTSSTGSPGSSPSASTGTGPGSSPSASTGTGPGTPGSGTASSSPGSSTPSGATGSPGSSPSASTGTGPGASPGTSSTGSPGTPGSGTASSSPGSSTPSGATGSPGTPGSGTASSSPGASPGTSSTGSPGASPGTSSTGSPGTPGSGTASSSPGSSTPSGATGSPGASPGTSSTGSPGTPGSGTASSSPGSSTPSGATGSPGSSPSASTGTGPGSSPSASTGTGPGSSTPSGATGSPGSSTPSGATGSPGASPGTSSTGSPGASPGTSSTGSPGASPGTSSTGSPGTPGSGTASSSPGASPGTSSTGSPGASPGTSSTGSPGASPGTSSTGSPGSSPSASTGTGPGTPGSGTASSSPGASPGTSSTGSPGASPGTSSTGSPGASPGTSSTGSPGSSTPSGATGSPGSSTPSGATGSPGASPGTSSTGSPGTPGSGTASSSPGSSTPSGATGSPGSSTPSGATGSPGSSTPSGATGSPGSSPSASTGTGPGASPGTSSTGSPGASPGTSSTGSPGTPGSGTASSSPGASPGTSSTGSPGASPGTSSTGSPGASPGTSSTGSPGASPGTSSTGSPGTPGSGTASSSPGSSTPSGATGSPGTPGSGTASSSPGSSTPSGATGSPGTPGSGTASSSPGSSTPSGATGSPGSSTPSGATGSPGSSPSASTGTGPGSSPSASTGTGPGASPGTSSTGSPGTPGSGTASSSPGSSTPSGATGSPGSSPSASTGTGPGSSPSASTGTGPGASPGTSSTGSPGASPGTSSTGSPGSSTPSGATGSPGSSPSASTGTGPGASPGTSSTGSPGSSPSASTGTGPGTPGSGTASSSPGSSTPSGATGSPGSSTPSGATGSPGASPGTSSTGSPTAEAAGCGTAEAAR

SEQ ID NO: 303 - protein, 916 aa, synthetic construct
  REGION 1..916: note = Description of Artificial Sequence: Synthetic polypeptide
EPTAATTGESAGTAEAAGCGTAEAAGASPGTSSTGSPGSSPSASTGTGPGSSPSASTGTGPGTPGSGTASSSPGSSTPSGATGSPGSSPSASTGTGPGASPGTSSTGSPGTPGSGTASSSPGSSTPSGATGSPGTPGSGTASSSPGASPGTSSTGSPGASPGTSSTGSPGTPGSGTASSSPGSSTPSGATGSPGASPGTSSTGSPGTPGSGTASSSPGSSTPSGATGSPGSSPSASTGTGPGSSPSASTGTGPGSSTPSGATGSPGSSTPSGATGSPGASPGTSSTGSPGASPGTSSTGSPGASPGTSSTGSPGTPGSGTASSSPGASPGTSSTGSPGASPGTSSTGSPGASPGTSSTGSPGSSPSASTGTGPGTPGSGTASSSPGASPGTSSTGSPGASPGTSSTGSPGASPGTSSTGSPGSSTPSGATGSPGSSTPSGATGSPGASPGTSSTGSPTAEAAGCGTAEAAGTPGSGTASSSPGSSTPSGATGSPGSSTPSGATGSPGSSTPSGATGSPGSSPSASTGTGPGASPGTSSTGSPGASPGTSSTGSPGTPGSGTASSSPGASPGTSSTGSPGASPGTSSTGSPGASPGTSSTGSPGASPGTSSTGSPGTPGSGTASSSPGSSTPSGATGSPGTPGSGTASSSPGSSTPSGATGSPGTPGSGTASSSPGSSTPSGATGSPGSSTPSGATGSPGSSPSASTGTGPGSSPSASTGTGPGASPGTSSTGSPGTPGSGTASSSPGSSTPSGATGSPGSSPSASTGTGPGSSPSASTGTGPGASPGTSSTGSPGASPGTSSTGSPGSSTPSGATGSPGSSPSASTGTGPGASPGTSSTGSPGSSPSASTGTGPGTPGSGTASSSPGSSTPSGATGSPGSSTPSGATGSPGASPGTSSTGSPTAEAAGCGTAEAAR

SEQ ID NO: 304 - protein, 929 aa, synthetic construct
  REGION 1..929: note = Description of Artificial Sequence: Synthetic polypeptide
EPTAATTGESAGTAEAAGCGTAEAAGASPGTSSTGSPGSSPSASTGTGPGSSPSASTGTGPGTPGSGTASSSPGSSTPSGATGSPGSSPSASTGTGPGASPGTSSTGSPGTPGSGTASSSPGSSTPSGATGSPGTPGSGTASSSPGASPGTSSTGSPGASPGTSSTGSPGTPGSGTASSSPGSSTPSGATGSPGASPGTSSTGSPGTPGSGTASSSPGSSTPSGATGSPGSSPSASTGTGPGSSPSASTGTGPGSSTPSGATGSPGSSTPSGATGSPGASPGTSSTGSPGASPGTSSTGSPGASPGTSSTGSPTAEAAGCGTAEAAGTPGSGTASSSPGASPGTSSTGSPGASPGTSSTGSPGASPGTSSTGSPGSSPSASTGTGPGTPGSGTASSSPGASPGTSSTGSPGASPGTSSTGSPGASPGTSSTGSPGSSTPSGATGSPGSSTPSGATGSPGASPGTSSTGSPGTPGSGTASSSPGSSTPSGATGSPGSSTPSGATGSPGSSTPSGATGSPGSSPSASTGTGPGASPGTSSTGSPGASPGTSSTGSPGTPGSGTASSSPGASPGTSSTGSPGASPGTSSTGSPGASPGTSSTGSPGASPGTSSTGSPTAEAAGCGTAEAAGTPGSGTASSSPGSSTPSGATGSPGTPGSGTASSSPGSSTPSGATGSPGTPGSGTASSSPGSSTPSGATGSPGSSTPSGATGSPGSSPSASTGTGPGSSPSASTGTGPGASPGTSSTGSPGTPGSGTASSSPGSSTPSGATGSPGSSPSASTGTGPGSSPSASTGTGPGASPGTSSTGSPGASPGTSSTGSPGSSTPSGATGSPGSSPSASTGTGPGASPGTSSTGSPGSSPSASTGTGPGTPGSGTASSSPGSSTPSGATGSPGSSTPSGATGSPGASPGTSSTGSPTAEAAGCGTAEAAR

SEQ ID NO: 305 - protein, 891 aa, synthetic construct
  REGION 1..891: note = Description of Artificial Sequence: Synthetic polypeptide
AEATTAAGGAEEEGASPGTSSTGSPGSSPSASTGTGPGSSPSASTGTGPGTPGSGTASSSPGSSTPSGATGSPGSSPSASTGTGPGASPGTSSTGSPGTPGSGTASSSPGSSTPSGATGSPGTPGSGTASSSPGASPGTSSTGSPGASPGTSSTGSPGTPGSGTASSSPGSSTPSGATGSPGASPGTSSTGSPGTPGSGTASSSPGSSTPSGATGSPGSSPSASTGTGPGSSPSASTGTGPGSSTPSGATGSPGSSTPSGATGSPGASPGTSSTGSPGASPGTSSTGSPGASPGTSSTGSPGTPGSGTASSSPGASPGTSSTGSPGASPGTSSTGSPGASPGTSSTGSPGSSPSASTGTGPGTPGSGTASSSPGASPGTSSTGSPGASPGTSSTGSPGASPGTSSTGSPGSSTPSGATGSPGSSTPSGATGSPGASPGTSSTGSPTAEAAGCGTAEAAGTPGSGTASSSPGSSTPSGATGSPGSSTPSGATGSPGSSTPSGATGSPGSSPSASTGTGPGASPGTSSTGSPGASPGTSSTGSPGTPGSGTASSSPGASPGTSSTGSPGASPGTSSTGSPGASPGTSSTGSPGASPGTSSTGSPGTPGSGTASSSPGSSTPSGATGSPGTPGSGTASSSPGSSTPSGATGSPGTPGSGTASSSPGSSTPSGATGSPGSSTPSGATGSPGSSPSASTGTGPGSSPSASTGTGPGASPGTSSTGSPGTPGSGTASSSPGSSTPSGATGSPGSSPSASTGTGPGSSPSASTGTGPGASPGTSSTGSPGASPGTSSTGSPGSSTPSGATGSPGSSPSASTGTGPGASPGTSSTGSPGSSPSASTGTGPGTPGSGTASSSPGSSTPSGATGSPGSSTPSGATGSPGASPGTSSTGSPR

SEQ ID NO: 306 - protein, 904 aa, synthetic construct
  REGION 1..904: note = Description of Artificial Sequence: Synthetic polypeptide
AEATTAAGGAEEETAEAAGCGTAEAAGASPGTSSTGSPGSSPSASTGTGPGSSPSASTGTGPGTPGSGTASSSPGSSTPSGATGSPGSSPSASTGTGPGASPGTSSTGSPGTPGSGTASSSPGSSTPSGATGSPGTPGSGTASSSPGASPGTSSTGSPGASPGTSSTGSPGTPGSGTASSSPGSSTPSGATGSPGASPGTSSTGSPGTPGSGTASSSPGSSTPSGATGSPGSSPSASTGTGPGSSPSASTGTGPGSSTPSGATGSPGSSTPSGATGSPGASPGTSSTGSPGASPGTSSTGSPGASPGTSSTGSPGTPGSGTASSSPGASPGTSSTGSPGASPGTSSTGSPGASPGTSSTGSPGSSPSASTGTGPGTPGSGTASSSPGASPGTSSTGSPGASPGTSSTGSPGASPGTSSTGSPGSSTPSGATGSPGSSTPSGATGSPGASPGTSSTGSPGTPGSGTASSSPGSSTPSGATGSPGSSTPSGATGSPGSSTPSGATGSPGSSPSASTGTGPGASPGTSSTGSPGASPGTSSTGSPGTPGSGTASSSPGASPGTSSTGSPGASPGTSSTGSPGASPGTSSTGSPGASPGTSSTGSPGTPGSGTASSSPGSSTPSGATGSPGTPGSGTASSSPGSSTPSGATGSPGTPGSGTASSSPGSSTPSGATGSPGSSTPSGATGSPGSSPSASTGTGPGSSPSASTGTGPGASPGTSSTGSPGTPGSGTASSSPGSSTPSGATGSPGSSPSASTGTGPGSSPSASTGTGPGASPGTSSTGSPGASPGTSSTGSPGSSTPSGATGSPGSSPSASTGTGPGASPGTSSTGSPGSSPSASTGTGPGTPGSGTASSSPGSSTPSGATGSPGSSTPSGATGSPGASPGTSSTGSPTAEAAGCGTAEAAR

SEQ ID NO: 307 - protein, 917 aa, synthetic construct
  REGION 1..917: note = Description of Artificial Sequence: Synthetic polypeptide
AEATTAAGGAEEETAEAAGCGTAEAAGASPGTSSTGSPGSSPSASTGTGPGSSPSASTGTGPGTPGSGTASSSPGSSTPSGATGSPGSSPSASTGTGPGASPGTSSTGSPGTPGSGTASSSPGSSTPSGATGSPGTPGSGTASSSPGASPGTSSTGSPGASPGTSSTGSPGTPGSGTASSSPGSSTPSGATGSPGASPGTSSTGSPGTPGSGTASSSPGSSTPSGATGSPGSSPSASTGTGPGSSPSASTGTGPGSSTPSGATGSPGSSTPSGATGSPGASPGTSSTGSPGASPGTSSTGSPGASPGTSSTGSPGTPGSGTASSSPGASPGTSSTGSPGASPGTSSTGSPGASPGTSSTGSPGSSPSASTGTGPGTPGSGTASSSPGASPGTSSTGSPGASPGTSSTGSPGASPGTSSTGSPGSSTPSGATGSPGSSTPSGATGSPGASPGTSSTGSPTAEAAGCGTAEAAGTPGSGTASSSPGSSTPSGATGSPGSSTPSGATGSPGSSTPSGATGSPGSSPSASTGTGPGASPGTSSTGSPGASPGTSSTGSPGTPGSGTASSSPGASPGTSSTGSPGASPGTSSTGSPGASPGTSSTGSPGASPGTSSTGSPGTPGSGTASSSPGSSTPSGATGSPGTPGSGTASSSPGSSTPSGATGSPGTPGSGTASSSPGSSTPSGATGSPGSSTPSGATGSPGSSPSASTGTGPGSSPSASTGTGPGASPGTSSTGSPGTPGSGTASSSPGSSTPSGATGSPGSSPSASTGTGPGSSPSASTGTGPGASPGTSSTGSPGASPGTSSTGSPGSSTPSGATGSPGSSPSASTGTGPGASPGTSSTGSPGSSPSASTGTGPGTPGSGTASSSPGSSTPSGATGSPGSSTPSGATGSPGASPGTSSTGSPTAEAAGCGTAEAAR

SEQ ID NO: 308 - protein, 930 aa, synthetic construct
  REGION 1..930: note = Description of Artificial Sequence: Synthetic polypeptide
AEATTAAGGAEEETAEAAGCGTAEAAGASPGTSSTGSPGSSPSASTGTGPGSSPSASTGTGPGTPGSGTASSSPGSSTPSGATGSPGSSPSASTGTGPGASPGTSSTGSPGTPGSGTASSSPGSSTPSGATGSPGTPGSGTASSSPGASPGTSSTGSPGASPGTSSTGSPGTPGSGTASSSPGSSTPSGATGSPGASPGTSSTGSPGTPGSGTASSSPGSSTPSGATGSPGSSPSASTGTGPGSSPSASTGTGPGSSTPSGATGSPGSSTPSGATGSPGASPGTSSTGSPGASPGTSSTGSPGASPGTSSTGSPTAEAAGCGTAEAAGTPGSGTASSSPGASPGTSSTGSPGASPGTSSTGSPGASPGTSSTGSPGSSPSASTGTGPGTPGSGTASSSPGASPGTSSTGSPGASPGTSSTGSPGASPGTSSTGSPGSSTPSGATGSPGSSTPSGATGSPGASPGTSSTGSPGTPGSGTASSSPGSSTPSGATGSPGSSTPSGATGSPGSSTPSGATGSPGSSPSASTGTGPGASPGTSSTGSPGASPGTSSTGSPGTPGSGTASSSPGASPGTSSTGSPGASPGTSSTGSPGASPGTSSTGSPGASPGTSSTGSPTAEAAGCGTAEAAGTPGSGTASSSPGSSTPSGATGSPGTPGSGTASSSPGSSTPSGATGSPGTPGSGTASSSPGSSTPSGATGSPGSSTPSGATGSPGSSPSASTGTGPGSSPSASTGTGPGASPGTSSTGSPGTPGSGTASSSPGSSTPSGATGSPGSSPSASTGTGPGSSPSASTGTGPGASPGTSSTGSPGASPGTSSTGSPGSSTPSGATGSPGSSPSASTGTGPGASPGTSSTGSPGSSPSASTGTGPGTPGSGTASSSPGSSTPSGATGSPGSSTPSGATGSPGASPGTSSTGSPTAEAAGCGTAEAAR

SEQ ID NO: 309 - protein, 893 aa, synthetic construct
  REGION 1..893: note = Description of Artificial Sequence: Synthetic polypeptide
ATGTATSEGSPEEEEGASPGTSSTGSPGSSPSASTGTGPGSSPSASTGTGPGTPGSGTASSSPGSSTPSGATGSPGSSPSASTGTGPGASPGTSSTGSPGTPGSGTASSSPGSSTPSGATGSPGTPGSGTASSSPGASPGTSSTGSPGASPGTSSTGSPGTPGSGTASSSPGSSTPSGATGSPGASPGTSSTGSPGTPGSGTASSSPGSSTPSGATGSPGSSPSASTGTGPGSSPSASTGTGPGSSTPSGATGSPGSSTPSGATGSPGASPGTSSTGSPGASPGTSSTGSPGASPGTSSTGSPGTPGSGTASSSPGASPGTSSTGSPGASPGTSSTGSPGASPGTSSTGSPGSSPSASTGTGPGTPGSGTASSSPGASPGTSSTGSPGASPGTSSTGSPGASPGTSSTGSPGSSTPSGATGSPGSSTPSGATGSPGASPGTSSTGSPTAEAAGCGTAEAAGTPGSGTASSSPGSSTPSGATGSPGSSTPSGATGSPGSSTPSGATGSPGSSPSASTGTGPGASPGTSSTGSPGASPGTSSTGSPGTPGSGTASSSPGASPGTSSTGSPGASPGTSSTGSPGASPGTSSTGSPGASPGTSSTGSPGTPGSGTASSSPGSSTPSGATGSPGTPGSGTASSSPGSSTPSGATGSPGTPGSGTASSSPGSSTPSGATGSPGSSTPSGATGSPGSSPSASTGTGPGSSPSASTGTGPGASPGTSSTGSPGTPGSGTASSSPGSSTPSGATGSPGSSPSASTGTGPGSSPSASTGTGPGASPGTSSTGSPGASPGTSSTGSPGSSTPSGATGSPGSSPSASTGTGPGASPGTSSTGSPGSSPSASTGTGPGTPGSGTASSSPGSSTPSGATGSPGSSTPSGATGSPGASPGTSSTGSPR

SEQ ID NO: 310 - protein, 906 aa, synthetic construct
  REGION 1..906: note = Description of Artificial Sequence: Synthetic polypeptide
ATGTATSEGSPEEEETAEAAGCGTAEAAGASPGTSSTGSPGSSPSASTGTGPGSSPSASTGTGPGTPGSGTASSSPGSSTPSGATGSPGSSPSASTGTGPGASPGTSSTGSPGTPGSGTASSSPGSSTPSGATGSPGTPGSGTASSSPGASPGTSSTGSPGASPGTSSTGSPGTPGSGTASSSPGSSTPSGATGSPGASPGTSSTGSPGTPGSGTASSSPGSSTPSGATGSPGSSPSASTGTGPGSSPSASTGTGPGSSTPSGATGSPGSSTPSGATGSPGASPGTSSTGSPGASPGTSSTGSPGASPGTSSTGSPGTPGSGTASSSPGASPGTSSTGSPGASPGTSSTGSPGASPGTSSTGSPGSSPSASTGTGPGTPGSGTASSSPGASPGTSSTGSPGASPGTSSTGSPGASPGTSSTGSPGSSTPSGATGSPGSSTPSGATGSPGASPGTSSTGSPGTPGSGTASSSPGSSTPSGATGSPGSSTPSGATGSPGSSTPSGATGSPGSSPSASTGTGPGASPGTSSTGSPGASPGTSSTGSPGTPGSGTASSSPGASPGTSSTGSPGASPGTSSTGSPGASPGTSSTGSPGASPGTSSTGSPGTPGSGTASSSPGSSTPSGATGSPGTPGSGTASSSPGSSTPSGATGSPGTPGSGTASSSPGSSTPSGATGSPGSSTPSGATGSPGSSPSASTGTGPGSSPSASTGTGPGASPGTSSTGSPGTPGSGTASSSPGSSTPSGATGSPGSSPSASTGTGPGSSPSASTGTGPGASPGTSSTGSPGASPGTSSTGSPGSSTPSGATGSPGSSPSASTGTGPGASPGTSSTGSPGSSPSASTGTGPGTPGSGTASSSPGSSTPSGATGSPGSSTPSGATGSPGASPGTSSTGSPTAEAAGCGTAEAAR

SEQ ID NO: 311 - protein, 919 aa, synthetic construct
  REGION 1..919: note = Description of Artificial Sequence: Synthetic polypeptide
ATGTATSEGSPEEEETAEAAGCGTAEAAGASPGTSSTGSPGSSPSASTGTGPGSSPSASTGTGPGTPGSGTASSSPGSSTPSGATGSPGSSPSASTGTGPGASPGTSSTGSPGTPGSGTASSSPGSSTPSGATGSPGTPGSGTASSSPGASPGTSSTGSPGASPGTSSTGSPGTPGSGTASSSPGSSTPSGATGSPGASPGTSSTGSPGTPGSGTASSSPGSSTPSGATGSPGSSPSASTGTGPGSSPSASTGTGPGSSTPSGATGSPGSSTPSGATGSPGASPGTSSTGSPGASPGTSSTGSPGASPGTSSTGSPGTPGSGTASSSPGASPGTSSTGSPGASPGTSSTGSPGASPGTSSTGSPGSSPSASTGTGPGTPGSGTASSSPGASPGTSSTGSPGASPGTSSTGSPGASPGTSSTGSPGSSTPSGATGSPGSSTPSGATGSPGASPGTSSTGSPTAEAAGCGTAEAAGTPGSGTASSSPGSSTPSGATGSPGSSTPSGATGSPGSSTPSGATGSPGSSPSASTGTGPGASPGTSSTGSPGASPGTSSTGSPGTPGSGTASSSPGASPGTSSTGSPGASPGTSSTGSPGASPGTSSTGSPGASPGTSSTGSPGTPGSGTASSSPGSSTPSGATGSPGTPGSGTASSSPGSSTPSGATGSPGTPGSGTASSSPGSSTPSGATGSPGSSTPSGATGSPGSSPSASTGTGPGSSPSASTGTGPGASPGTSSTGSPGTPGSGTASSSPGSSTPSGATGSPGSSPSASTGTGPGSSPSASTGTGPGASPGTSSTGSPGASPGTSSTGSPGSSTPSGATGSPGSSPSASTGTGPGASPGTSSTGSPGSSPSASTGTGPGTPGSGTASSSPGSSTPSGATGSPGSSTPSGATGSPGASPGTSSTGSPTAEAAGCGTAEAAR

SEQ ID NO: 312 - protein, 932 aa, synthetic construct
  REGION 1..932: note = Description of Artificial Sequence: Synthetic polypeptide
ATGTATSEGSPEEEETAEAAGCGTAEAAGASPGTSSTGSPGSSPSASTGTGPGSSPSASTGTGPGTPGSGTASSSPGSSTPSGATGSPGSSPSASTGTGPGASPGTSSTGSPGTPGSGTASSSPGSSTPSGATGSPGTPGSGTASSSPGASPGTSSTGSPGASPGTSSTGSPGTPGSGTASSSPGSSTPSGATGSPGASPGTSSTGSPGTPGSGTASSSPGSSTPSGATGSPGSSPSASTGTGPGSSPSASTGTGPGSSTPSGATGSPGSSTPSGATGSPGASPGTSSTGSPGASPGTSSTGSPGASPGTSSTGSPTAEAAGCGTAEAAGTPGSGTASSSPGASPGTSSTGSPGASPGTSSTGSPGASPGTSSTGSPGSSPSASTGTGPGTPGSGTASSSPGASPGTSSTGSPGASPGTSSTGSPGASPGTSSTGSPGSSTPSGATGSPGSSTPSGATGSPGASPGTSSTGSPGTPGSGTASSSPGSSTPSGATGSPGSSTPSGATGSPGSSTPSGATGSPGSSPSASTGTGPGASPGTSSTGSPGASPGTSSTGSPGTPGSGTASSSPGASPGTSSTGSPGASPGTSSTGSPGASPGTSSTGSPGASPGTSSTGSPTAEAAGCGTAEAAGTPGSGTASSSPGSSTPSGATGSPGTPGSGTASSSPGSSTPSGATGSPGTPGSGTASSSPGSSTPSGATGSPGSSTPSGATGSPGSSPSASTGTGPGSSPSASTGTGPGASPGTSSTGSPGTPGSGTASSSPGSSTPSGATGSPGSSPSASTGTGPGSSPSASTGTGPGASPGTSSTGSPGASPGTSSTGSPGSSTPSGATGSPGSSPSASTGTGPGASPGTSSTGSPGSSPSASTGTGPGTPGSGTASSSPGSSTPSGATGSPGSSTPSGATGSPGASPGTSSTGSPTAEAAGCGTAEAAR

SEQ ID NO: 313 - protein, 898 aa, synthetic construct
  REGION 1..898: note = Description of Artificial Sequence: Synthetic polypeptide
AEATTAAGGAEEEGASPGTSSTGSPGSSPSASTGTGPGSSPSASTGTGPGTPGSGTASSSPGSSTPSGATGSPGSSPSASTGTGPGASPGTSSTGSPGTPGSGTASSSPGSSTPSGATGSPGTPGSGTASSSPGASPGTSSTGSPGASPGTSSTGSPGTPGSGTASSSPGSSTPSGATGSPGASPGTSSTGSPGTPGSGTASSSPGSSTPSGATGSPGSSPSASTGTGPGSSPSASTGTGPGSSTPSGATGSPGSSTPSGATGSPGASPGTSSTGSPGASPGTSSTGSPGASPGTSSTGSPGTPGSGTASSSPGASPGTSSTGSPGASPGTSSTGSPGASPGTSSTGSPGSSPSASTGTGPGTPGSGTASSSPGASPGTSSTGSPGASPGTSSTGSPGASPGTSSTGSPGSSTPSGATGSPGSSTPSGATGSPGASPGTSSTGSPTAEAAGCGTAEAAGTPGSGTASSSPGSSTPSGATGSPGSSTPSGATGSPGSSTPSGATGSPGSSPSASTGTGPGASPGTSSTGSPGASPGTSSTGSPGTPGSGTASSSPGASPGTSSTGSPGASPGTSSTGSPGASPGTSSTGSPGASPGTSSTGSPGTPGSGTASSSPGSSTPSGATGSPGTPGSGTASSSPGSSTPSGATGSPGTPGSGTASSSPGSSTPSGATGSPGSSTPSGATGSPGSSPSASTGTGPGSSPSASTGTGPGASPGTSSTGSPGTPGSGTASSSPGSSTPSGATGSPGSSPSASTGTGPGSSPSASTGTGPGASPGTSSTGSPGASPGTSSTGSPGSSTPSGATGSPGSSPSASTGTGPGASPGTSSTGSPGSSPSASTGTGPGTPGSGTASSSPGSSTPSGATGSPGSSTPSGATGSPGASPGTSSTGSPRPRPRPRP

SEQ ID NO: 314 - protein, 911 aa, synthetic construct
  REGION 1..911: note = Description of Artificial Sequence: Synthetic polypeptide
AEATTAAGGAEEETAEAAGCGTAEAAGASPGTSSTGSPGSSPSASTGTGPGSSPSASTGTGPGTPGSGTASSSPGSSTPSGATGSPGSSPSASTGTGPGASPGTSSTGSPGTPGSGTASSSPGSSTPSGATGSPGTPGSGTASSSPGASPGTSSTGSPGASPGTSSTGSPGTPGSGTASSSPGSSTPSGATGSPGASPGTSSTGSPGTPGSGTASSSPGSSTPSGATGSPGSSPSASTGTGPGSSPSASTGTGPGSSTPSGATGSPGSSTPSGATGSPGASPGTSSTGSPGASPGTSSTGSPGASPGTSSTGSPGTPGSGTASSSPGASPGTSSTGSPGASPGTSSTGSPGASPGTSSTGSPGSSPSASTGTGPGTPGSGTASSSPGASPGTSSTGSPGASPGTSSTGSPGASPGTSSTGSPGSSTPSGATGSPGSSTPSGATGSPGASPGTSSTGSPGTPGSGTASSSPGSSTPSGATGSPGSSTPSGATGSPGSSTPSGATGSPGSSPSASTGTGPGASPGTSSTGSPGASPGTSSTGSPGTPGSGTASSSPGASPGTSSTGSPGASPGTSSTGSPGASPGTSSTGSPGASPGTSSTGSPGTPGSGTASSSPGSSTPSGATGSPGTPGSGTASSSPGSSTPSGATGSPGTPGSGTASSSPGSSTPSGATGSPGSSTPSGATGSPGSSPSASTGTGPGSSPSASTGTGPGASPGTSSTGSPGTPGSGTASSSPGSSTPSGATGSPGSSPSASTGTGPGSSPSASTGTGPGASPGTSSTGSPGASPGTSSTGSPGSSTPSGATGSPGSSPSASTGTGPGASPGTSSTGSPGSSPSASTGTGPGTPGSGTASSSPGSSTPSGATGSPGSSTPSGATGSPGASPGTSSTGSPTAEAAGCGTAEAARPRPRPRP

SEQ ID NO: 315 - protein, 924 aa, synthetic construct
  REGION 1..924: note = Description of Artificial Sequence: Synthetic polypeptide
AEATTAAGGAEEETAEAAGCGTAEAAGASPGTSSTGSPGSSPSASTGTGPGSSPSASTGTGPGTPGSGTASSSPGSSTPSGATGSPGSSPSASTGTGPGASPGTSSTGSPGTPGSGTASSSPGSSTPSGATGSPGTPGSGTASSSPGASPGTSSTGSPGASPGTSSTGSPGTPGSGTASSSPGSSTPSGATGSPGASPGTSSTGSPGTPGSGTASSSPGSSTPSGATGSPGSSPSASTGTGPGSSPSASTGTGPGSSTPSGATGSPGSSTPSGATGSPGASPGTSSTGSPGASPGTSSTGSPGASPGTSSTGSPGTPGSGTASSSPGASPGTSSTGSPGASPGTSSTGSPGASPGTSSTGSPGSSPSASTGTGPGTPGSGTASSSPGASPGTSSTGSPGASPGTSSTGSPGASPGTSSTGSPGSSTPSGATGSPGSSTPSGATGSPGASPGTSSTGSPTAEAAGCGTAEAAGTPGSGTASSSPGSSTPSGATGSPGSSTPSGATGSPGSSTPSGATGSPGSSPSASTGTGPGASPGTSSTGSPGASPGTSSTGSPGTPGSGTASSSPGASPGTSSTGSPGASPGTSSTGSPGASPGTSSTGSPGASPGTSSTGSPGTPGSGTASSSPGSSTPSGATGSPGTPGSGTASSSPGSSTPSGATGSPGTPGSGTASSSPGSSTPSGATGSPGSSTPSGATGSPGSSPSASTGTGPGSSPSASTGTGPGASPGTSSTGSPGTPGSGTASSSPGSSTPSGATGSPGSSPSASTGTGPGSSPSASTGTGPGASPGTSSTGSPGASPGTSSTGSPGSSTPSGATGSPGSSPSASTGTGPGASPGTSSTGSPGSSPSASTGTGPGTPGSGTASSSPGSSTPSGATGSPGSSTPSGATGSPGASPGTSSTGSPTAEAAGCGTAEAARPRPRPRP

SEQ ID NO: 316 - protein, 937 aa, synthetic construct
  REGION 1..937: note = Description of Artificial Sequence: Synthetic polypeptide
AEATTAAGGAEEETAEAAGCGTAEAAGASPGTSSTGSPGSSPSASTGTGPGSSPSASTGTGPGTPGSGTASSSPGSSTPSGATGSPGSSPSASTGTGPGASPGTSSTGSPGTPGSGTASSSPGSSTPSGATGSPGTPGSGTASSSPGASPGTSSTGSPGASPGTSSTGSPGTPGSGTASSSPGSSTPSGATGSPGASPGTSSTGSPGTPGSGTASSSPGSSTPSGATGSPGSSPSASTGTGPGSSPSASTGTGPGSSTPSGATGSPGSSTPSGATGSPGASPGTSSTGSPGASPGTSSTGSPGASPGTSSTGSPTAEAAGCGTAEAAGTPGSGTASSSPGASPGTSSTGSPGASPGTSSTGSPGASPGTSSTGSPGSSPSASTGTGPGTPGSGTASSSPGASPGTSSTGSPGASPGTSSTGSPGASPGTSSTGSPGSSTPSGATGSPGSSTPSGATGSPGASPGTSSTGSPGTPGSGTASSSPGSSTPSGATGSPGSSTPSGATGSPGSSTPSGATGSPGSSPSASTGTGPGASPGTSSTGSPGASPGTSSTGSPGTPGSGTASSSPGASPGTSSTGSPGASPGTSSTGSPGASPGTSSTGSPGASPGTSSTGSPTAEAAGCGTAEAAGTPGSGTASSSPGSSTPSGATGSPGTPGSGTASSSPGSSTPSGATGSPGTPGSGTASSSPGSSTPSGATGSPGSSTPSGATGSPGSSPSASTGTGPGSSPSASTGTGPGASPGTSSTGSPGTPGSGTASSSPGSSTPSGATGSPGSSPSASTGTGPGSSPSASTGTGPGASPGTSSTGSPGASPGTSSTGSPGSSTPSGATGSPGSSPSASTGTGPGASPGTSSTGSPGSSPSASTGTGPGTPGSGTASSSPGSSTPSGATGSPGSSTPSGATGSPGASPGTSSTGSPTAEAAGCGTAEAARPRPRPRP

SEQ ID NO: 317 - protein, 891 aa, synthetic construct; identical to SEQ ID NO: 305
  REGION 1..891: note = Description of Artificial Sequence: Synthetic polypeptide

SEQ ID NO: 318 - protein, 904 aa, synthetic construct; identical to SEQ ID NO: 306
  REGION 1..904: note = Description of Artificial Sequence: Synthetic polypeptide

SEQ ID NO: 319 - protein, 917 aa, synthetic construct; identical to SEQ ID NO: 307
  REGION 1..917: note = Description of Artificial Sequence: Synthetic polypeptide

SEQ ID NO: 320 - protein, 930 aa, synthetic construct; identical to SEQ ID NO: 308
  REGION 1..930: note = Description of Artificial Sequence: Synthetic polypeptide

SEQ ID NO: 321 - protein, 914 aa, synthetic construct
  REGION 1..914: note = Description of Artificial Sequence: Synthetic polypeptide
AEATTAAGGAEEETAEAAGCGTAEAAGASPGTSSTGSPGSSPSASTGTGPGSSPSASTGTGPGTPGSGTASSSPGSSTPSGATGSPGSSPSASTGTGPGASPGTSSTGSPGTPGSGTASSSPGSSTPSGATGSPGTPGSGTASSSPGASPGTSSTGSPGASPGTSSTGSPGTPGSGTASSSPGSSTPSGATGSPGASPGTSSTGSPGTPGSGTASSSPGSSTPSGATGSPGSSPSASTGTGPGSSPSASTGTGPGSSTPSGATGSPGSSTPSGATGSPGASPGTSSTGSPGASPGTSSTGSPGASPGTSSTGSPGGKPGGTPGSGTASSSPGASPGTSSTGSPGASPGTSSTGSPGASPGTSSTGSPGSSPSASTGTGPGTPGSGTASSSPGASPGTSSTGSPGASPGTSSTGSPGASPGTSSTGSPGSSTPSGATGSPGSSTPSGATGSPGASPGTSSTGSPGTPGSGTASSSPGSSTPSGATGSPGSSTPSGATGSPGSSTPSGATGSPGSSPSASTGTGPGASPGTSSTGSPGASPGTSSTGSPGTPGSGTASSSPGASPGTSSTGSPGASPGTSSTGSPGASPGTSSTGSPGASPGTSSTGSPTAEAAGCGTAEAAGTPGSGTASSSPGSSTPSGATGSPGTPGSGTASSSPGSSTPSGATGSPGTPGSGTASSSPGSSTPSGATGSPGSSTPSGATGSPGSSPSASTGTGPGSSPSASTGTGPGASPGTSSTGSPGTPGSGTASSSPGSSTPSGATGSPGSSPSASTGTGPGSSPSASTGTGPGASPGTSSTGSPGASPGTSSTGSPGSSTPSGATGSPGSSPSASTGTGPGASPGTSSTGSPGSSPSASTGTGPGTPGSGTASSSPGSSTPSGATGSPGSSTPSGATGSPGASPGTSSTGSPGGKPGR

SEQ ID NO: 322 - protein, 922 aa, synthetic construct
  REGION 1..922: note = Description of Artificial Sequence: Synthetic polypeptide
AEATTAAGGAEEETAEAAGCGTAEAAGASPGTSSTGSPGSSPSASTGTGPGSSPSASTGTGPGTPGSGTASSSPGSSTPSGATGSPGSSPSASTGTGPGASPGTSSTGSPGTPGSGTASSSPGSSTPSGATGSPGTPGSGTASSSPGASPGTSSTGSPGASPGTSSTGSPGTPGSGTASSSPGSSTPSGATGSPGASPGTSSTGSPGTPGSGTASSSPGSSTPSGATGSPGSSPSASTGTGPGSSPSASTGTGPGSSTPSGATGSPGSSTPSGATGSPGASPGTSSTGSPGASPGTSSTGSPGASPGTSSTGSPTAEAAGCGTAEAAGTPGSGTASSSPGASPGTSSTGSPGASPGTSSTGSPGASPGTSSTGSPGSSPSASTGTGPGTPGSGTASSSPGASPGTSSTGSPGASPGTSSTGSPGASPGTSSTGSPGSSTPSGATGSPGSSTPSGATGSPGASPGTSSTGSPGTPGSGTASSSPGSSTPSGATGSPGSSTPSGATGSPGSSTPSGATGSPGSSPSASTGTGPGASPGTSSTGSPGASPGTSSTGSPGTPGSGTASSSPGASPGTSSTGSPGASPGTSSTGSPGASPGTSSTGSPGASPGTSSTGSPTAEAAGCGTAEAAGTPGSGTASSSPGSSTPSGATGSPGTPGSGTASSSPGSSTPSGATGSPGTPGSGTASSSPGSSTPSGATGSPGSSTPSGATGSPGSSPSASTGTGPGSSPSASTGTGPGASPGTSSTGSPGTPGSGTASSSPGSSTPSGATGSPGSSPSASTGTGPGSSPSASTGTGPGASPGTSSTGSPGASPGTSSTGSPGSSTPSGATGSPGSSPSASTGTGPGASPGTSSTGSPGSSPSASTGTGPGTPGSGTASSSPGSSTPSGATGSPGSSTPSGATGSPGASPGTSSTGSPGGKPGR

SEQ ID NO: 323 - protein, 906 aa, synthetic construct
  REGION 1..906: note = Description of Artificial Sequence: Synthetic polypeptide
AEATTAAGGAEEEGGKPGGASPGTSSTGSPGSSPSASTGTGPGSSPSASTGTGPGTPGSGTASSSPGSSTPSGATGSPGSSPSASTGTGPGASPGTSSTGSPGTPGSGTASSSPGSSTPSGATGSPGTPGSGTASSSPGASPGTSSTGSPGASPGTSSTGSPGTPGSGTASSSPGSSTPSGATGSPGASPGTSSTGSPGTPGSGTASSSPGSSTPSGATGSPGSSPSASTGTGPGSSPSASTGTGPGSSTPSGATGSPGSSTPSGATGSPGASPGTSSTGSPGASPGTSSTGSPGASPGTSSTGSPGGKPGGTPGSGTASSSPGASPGTSSTGSPGASPGTSSTGSPGASPGTSSTGSPGSSPSASTGTGPGTPGSGTASSSPGASPGTSSTGSPGASPGTSSTGSPGASPGTSSTGSPGSSTPSGATGSPGSSTPSGATGSPGASPGTSSTGSPGTPGSGTASSSPGSSTPSGATGSPGSSTPSGATGSPGSSTPSGATGSPGSSPSASTGTGPGASPGTSSTGSPGASPGTSSTGSPGTPGSGTASSSPGASPGTSSTGSPGASPGTSSTGSPGASPGTSSTGSPGASPGTSSTGSPGGKPGGTPGSGTASSSPGSSTPSGATGSPGTPGSGTASSSPGSSTPSGATGSPGTPGSGTASSSPGSSTPSGATGSPGSSTPSGATGSPGSSPSASTGTGPGSSPSASTGTGPGASPGTSSTGSPGTPGSGTASSSPGSSTPSGATGSPGSSPSASTGTGPGSSPSASTGTGPGASPGTSSTGSPGASPGTSSTGSPGSSTPSGATGSPGSSPSASTGTGPGASPGTSSTGSPGSSPSASTGTGPGTPGSGTASSSPGSSTPSGATGSPGSSTPSGATGSPGASPGTSSTGSPTAEAAGCGTAEAAR

SEQ ID NO: 324 - protein, 914 aa, synthetic construct; identical to SEQ ID NO: 321
  REGION 1..914: note = Description of Artificial Sequence: Synthetic polypeptide

SEQ ID NO: 325 - protein, 603 aa, synthetic construct
  REGION 1..603: note = Description of Artificial Sequence: Synthetic polypeptide
AEATTAAGGAEEEGASPGTSSTGSPGSSPSASTGTGPGSSPSASTGTGPGTPGSGTASSSPGSSTPSGATGSPGSSPSASTGTGPGASPGTSSTGSPGTPGSGTASSSPGSSTPSGATGSPGTPGSGTASSSPGASPGTSSTGSPGASPGTSSTGSPGTPGSGTASSSPGSSTPSGATGSPGASPGTSSTGSPGTPGSGTASSSPGSSTPSGATGSPGSSPSASTGTGPGSSPSASTGTGPGSSTPSGATGSPGSSTPSGATGSPGASPGTSSTGSPGASPGTSSTGSPGASPGTSSTGSPGTPGSGTASSSPGASPGTSSTGSPGASPGTSSTGSPGASPGTSSTGSPGSSPSASTGTGPGTPGSGTASSSPGASPGTSSTGSPGASPGTSSTGSPGASPGTSSTGSPGSSTPSGATGSPGSSTPSGATGSPGASPGTSSTGSPGTPGSGTASSSPGSSTPSGATGSPGSSTPSGATGSPGSSTPSGATGSPGSSPSASTGTGPGASPGTSSTGSPGASPGTSSTGSPGTPGSGTASSSPGASPGTSSTGSPGASPGTSSTGSPGASPGTSSTGSPGASPGTSSTGSPTAEAAGCGTAEAAR

SEQ ID NO: 326 - protein, 459 aa, synthetic construct
  REGION 1..459: note = Description of Artificial Sequence: Synthetic polypeptide
AEATTAAGGAEEEGASPGTSSTGSPGSSPSASTGTGPGSSPSASTGTGPGTPGSGTASSSPGSSTPSGATGSPGSSPSASTGTGPGASPGTSSTGSPGTPGSGTASSSPGSSTPSGATGSPGTPGSGTASSSPGASPGTSSTGSPGASPGTSSTGSPGTPGSGTASSSPGSSTPSGATGSPGASPGTSSTGSPGTPGSGTASSSPGSSTPSGATGSPGSSPSASTGTGPGSSPSASTGTGPGSSTPSGATGSPGSSTPSGATGSPGASPGTSSTGSPGASPGTSSTGSPGASPGTSSTGSPGTPGSGTASSSPGASPGTSSTGSPGASPGTSSTGSPGASPGTSSTGSPGSSPSASTGTGPGTPGSGTASSSPGASPGTSSTGSPGASPGTSSTGSPGASPGTSSTGSPGSSTPSGATGSPGSSTPSGATGSPGASPGTSSTGSPTAEAAGCGTAEAAR

SEQ ID NO: 327 - protein, 315 aa, synthetic construct
  REGION 1..315: note = Description of Artificial Sequence: Synthetic polypeptide
AEATTAAGGAEEEGASPGTSSTGSPGSSPSASTGTGPGSSPSASTGTGPGTPGSGTASSSPGSSTPSGATGSPGSSPSASTGTGPGASPGTSSTGSPGTPGSGTASSSPGSSTPSGATGSPGTPGSGTASSSPGASPGTSSTGSPGASPGTSSTGSPGTPGSGTASSSPGSSTPSGATGSPGASPGTSSTGSPGTPGSGTASSSPGSSTPSGATGSPGSSPSASTGTGPGSSPSASTGTGPGSSTPSGATGSPGSSTPSGATGSPGASPGTSSTGSPGASPGTSSTGSPGASPGTSSTGSPTAEAAGCGTAEAAR

SEQ ID NO: 328 - protein, 171 aa, synthetic construct
  REGION 1..171: note = Description of Artificial Sequence: Synthetic polypeptide
AEATTAAGGAEEEGASPGTSSTGSPGSSPSASTGTGPGSSPSASTGTGPGTPGSGTASSSPGSSTPSGATGSPGSSPSASTGTGPGASPGTSSTGSPGTPGSGTASSSPGSSTPSGATGSPGTPGSGTASSSPGASPGTSSTGSPGASPGTSSTGSPTAEAAGCGTAEAAR

SEQ ID NO: 329 - protein, 603 aa, synthetic construct; identical to SEQ ID NO: 325
  REGION 1..603: note = Description of Artificial Sequence: Synthetic polypeptide

SEQ ID NO: 330 - protein, 459 aa, synthetic construct; identical to SEQ ID NO: 326
  REGION 1..459: note = Description of Artificial Sequence: Synthetic polypeptide

SEQ ID NO: 331 - protein, 315 aa, synthetic construct; identical to SEQ ID NO: 327
  REGION 1..315: note = Description of Artificial Sequence: Synthetic polypeptide

SEQ ID NO: 332 - protein, 171 aa, synthetic construct; identical to SEQ ID NO: 328
  REGION 1..171: note = Description of Artificial Sequence: Synthetic polypeptide

SEQ ID NO: 333 - protein, 595 aa, synthetic construct
  REGION 1..595: note = Description of Artificial Sequence: Synthetic polypeptide
AEATTAAGGAEEEGASPGTSSTGSPGSSPSASTGTGPGSSPSASTGTGPGTPGSGTASSSPGSSTPSGATGSPGSSPSASTGTGPGASPGTSSTGSPGTPGSGTASSSPGSSTPSGATGSPGTPGSGTASSSPGASPGTSSTGSPGASPGTSSTGSPGTPGSGTASSSPGSSTPSGATGSPGASPGTSSTGSPGTPGSGTASSSPGSSTPSGATGSPGSSPSASTGTGPGSSPSASTGTGPGSSTPSGATGSPGSSTPSGATGSPGASPGTSSTGSPGASPGTSSTGSPGASPGTSSTGSPGTPGSGTASSSPGASPGTSSTGSPGASPGTSSTGSPGASPGTSSTGSPGSSPSASTGTGPGTPGSGTASSSPGASPGTSSTGSPGASPGTSSTGSPGASPGTSSTGSPGSSTPSGATGSPGSSTPSGATGSPGASPGTSSTGSPGTPGSGTASSSPGSSTPSGATGSPGSSTPSGATGSPGSSTPSGATGSPGSSPSASTGTGPGASPGTSSTGSPGASPGTSSTGSPGTPGSGTASSSPGASPGTSSTGSPGASPGTSSTGSPGASPGTSSTGSPGASPGTSSTGSPGGKPGR

SEQ ID NO: 334 - protein, 451 aa, synthetic construct
  REGION 1..451: note = Description of Artificial Sequence: Synthetic polypeptide
AEATTAAGGAEEEGASPGTSSTGSPGSSPSASTGTGPGSSPSASTGTGPGTPGSGTASSSPGSSTPSGATGSPGSSPSASTGTGPGASPGTSSTGSPGTPGSGTASSSPGSSTPSGATGSPGTPGSGTASSSPGASPGTSSTGSPGASPGTSSTGSPGTPGSGTASSSPGSSTPSGATGSPGASPGTSSTGSPGTPGSGTASSSPGSSTPSGATGSPGSSPSASTGTGPGSSPSASTGTGPGSSTPSGATGSPGSSTPSGATGSPGASPGTSSTGSPGASPGTSSTGSPGASPGTSSTGSPGTPGSGTASSSPGASPGTSSTGSPGASPGTSSTGSPGASPGTSSTGSPGSSPSASTGTGPGTPGSGTASSSPGASPGTSSTGSPGASPGTSSTGSPGASPGTSSTGSPGSSTPSGATGSPGSSTPSGATGSPGASPGTSSTGSPGGKPGR

SEQ ID NO: 335 - protein, 307 aa, synthetic construct
  REGION 1..307: note = Description of Artificial Sequence: Synthetic polypeptide
AEATTAAGGAEEEGASPGTSSTGSPGSSPSASTGTGPGSSPSASTGTGPGTPGSGTASSSPGSSTPSGATGSPGSSPSASTGTGPGASPGTSSTGSPGTPGSGTASSSPGSSTPSGATGSPGTPGSGTASSSPGASPGTSSTGSPGASPGTSSTGSPGTPGSGTASSSPGSSTPSGATGSPGASPGTSSTGSPGTPGSGTASSSPGSSTPSGATGSPGSSPSASTGTGPGSSPSASTGTGPGSSTPSGATGSPGSSTPSGATGSPGASPGTSSTGSPGASPGTSSTGSPGASPGTSSTGSPGGKPGR

SEQ ID NO: 336 - protein, 163 aa, synthetic construct
  REGION 1..163: note = Description of Artificial Sequence: Synthetic polypeptide
AEATTAAGGAEEEGASPGTSSTGSPGSSPSASTGTGPGSSPSASTGTGPGTPGSGTASSSPGSSTPSGATGSPGSSPSASTGTGPGASPGTSSTGSPGTPGSGTASSSPGSSTPSGATGSPGTPGSGTASSSPGASPGTSSTGSPGASPGTSSTGSPGGKPGR

SEQ ID NO: 337 - protein, 595 aa, synthetic construct; identical to SEQ ID NO: 333
  REGION 1..595: note = Description of Artificial Sequence: Synthetic polypeptide

SEQ ID NO: 338 - protein, 451 aa, synthetic construct; identical to SEQ ID NO: 334
  REGION 1..451: note = Description of Artificial Sequence: Synthetic polypeptide

SEQ ID NO: 339 - protein, 307 aa, synthetic construct; identical to SEQ ID NO: 335
  REGION 1..307: note = Description of Artificial Sequence: Synthetic polypeptide

SEQ ID NO: 340 - protein, 163 aa, synthetic construct; identical to SEQ ID NO: 336
  REGION 1..163: note = Description of Artificial Sequence: Synthetic polypeptide

SEQ ID NO: 341 - protein, 734 aa, synthetic construct
  REGION 1..734: note = Description of Artificial Sequence: Synthetic polypeptide
GSEPATSGSETPGTSESATPESGPGSEPATSGSETPGSPAGSPTSTEEGTSTEPSEGSAPGSEPATSGSETPGSEPATSGSETPGSEPATSGSETPGTSTEPSEGSAPGTSESATPESGPGSEPATSGSETPGTSTEPSEGSAPGGGSPAGSCTSPGGSPAGSPTSTEEGTSESATPESGPGTSTEPSEGSAPGSPAGSPTSTEEGTSTEPSEGSAPGTSTEPSEGSAPGTSESATPESGPGSEPATSGSETPGSEPATSGSETPGSPAGSPTSTEEGTSESATPESGPGTSTEPSEGSAPGTSTEPSEGSAPGSPAGSPTSTEEGTSTEPSEGSAPGTSTEPSEGSAPGTSESATPESGPGTSTEPSEGSAPGTSESATPESGPGSEPATSGSETPGTSTEPSEGSAPGTSTEPSEGSAPGTSESATPESGPGTSESATPESGPGSPAGSPTSTEEGTSESATPESGPGSEPATSGSETPGTSESATPESGPGTSTEPSEGSAPGTSTEPSEGSAPGTSTEPSEGSAPGTSTEPSEGSAPGTSTEPSEGSAPGTSTEPSEGSAPGSPAGSPTSTEEGTSTEPSEGSAPGTSESATPESGPGSEPATSGSETPGTSESATPESGPGSEPATSGSETPGTSESATPESGPGTSTEPSEGSAPGTSESATPESGPGSPAGSPTSTEEGSPAGSPTSTEEGSPAGSPTSTEEGTSESATPESGPGTSTEPSEGSAPG

SEQ ID NO: 342 - protein, 1071 aa, synthetic construct
  REGION 1..1071: note = Description of Artificial Sequence: Synthetic polypeptide
MAEPAGSPTSTEEGTPGSGTASSSPGSSTPSGATGSPGASPGTSSTGSPGSPAGSPTSTEEGTSESATPESGPGTSTEPSEGSAPGSPAGSPTSTEEGTSTEPSEGSAPGTSTEPSEGSAPGTSESATPESGPGSEPATSGSETPGSEPATSGSETPGSPAGSPTSTEEGTSESATPESGPGTSTEPSEGSAPGTSTEPSEGSAPGSPAGSPTSTEEGTSTEPSEGSAPGTSTEPSEGSAPGTSESATPESGPGTSTEPSEGSAPGTSESATPESGPGSEPATSGSETPGTSTEPSEGSAPGTSTEPSEGSAPGTSESATPESGPGTSESATPESGPGSPAGSPTSTEEGTSESATPESGPGSEPATSGSETPGTSESATPESGPGTSTEPSEGSAPGTSTEPSEGSAPGTSTEPSEGSAPGTSTEPSEGSAPGTSTEPSEGSAPGTSTEPSEGSAPGSPAGSPTSTEEGTSTEPSEGSAPGTSESATPESGPGSEPATSGSETPGTSESATPESGPGSEPATSGSETPGTSESATPESGPGTSTEPSEGSAPGTSESATPESGPGSPAGSPTSTEEGSPAGSPTSTEEGSPAGSPTSTEEGTSESATPESGPGTSTEPSEGSAPGTSESATPESGPGSEPATSGSETPGTSESATPESGPGSEPATSGSETPGTSESATPESGPGTSTEPSEGSAPGSPAGSPTSTEEGTSESATPESGPGSEPATSGSETPGTSESATPESGPGSPAGSPTSTEEGSPAGSPTSTEEGTSTEPSEGSAPGTSESATPESGPGTSESATPESGPGTSESATPESGPGSEPATSGSETPGSEPATSGSETPGSPAGSPTSTEEGTSTEPSEGSAPGTSTEPSEGSAPGSEPATSGSETPGTSESATPESGPGTSTEPSEGSAPGGASASCAPSTGGGSEPATSGSETPGTSESATPESGPGSEPATSGSETPGSPAGSPTSTEEGTSTEPSEGSAPGSEPATSGSETPGSEPATSGSETPGSEPATSGSETPGTSTEPSEGSAPGTSESATPESGPGSEPATSGSETPGTSTEPSEGSAPG

SEQ ID NO: 343 - protein, 878 aa, synthetic construct
  REGION 1..878: note = Description of Artificial Sequence: Synthetic polypeptide
GSPAGSPTSTEEGTSESATPESGPGTSTEPSEGSAPGSPAGSPTSTEEGTSTEPSEGSAPGTSTEPSEGSAPGTSESATPESGPGSEPATSGSETPGSEPATSGSETPGSPAGSPTSTEEGTSESATPESGPGTSTEPSEGSAPGTSTEPSEGSAPGSPAGSPTSTEEGTSTEPSEGSAPGTSTEPSEGSAPGTSESATPESGPGTSTEPSEGSAPGTSESATPESGPGSEPATSGSETPGTSTEPSEGSAPGTSTEPSEGSAPGTSESATPESGPGTSESATPESGPGSPAGSPTSTEEGTSESATPESGPGSEPATSGSETPGTSESATPESGPGTSTEPSEGSAPGTSTEPSEGSAPGTSTEPSEGSAPGTSTEPSEGSAPGTSTEPSEGSAPGTSTEPSEGSAPGSPAGSPTSTEEGTSTEPSEGSAPGTSESATPESGPGSEPATSGSETPGTSESATPESGPGSEPATSGSETPGTSESATPESGPGTSTEPSEGSAPGTSESATPESGPGSPAGSPTSTEEGSPAGSPTSTEEGSPAGSPTSTEEGTSESATPESGPGTSTEPSEGSAPGGGSPAGSCTSPGGTSESATPESGPGSEPATSGSETPGTSESATPESGPGSEPATSGSETPGTSESATPESGPGTSTEPSEGSAPGSPAGSPTSTEEGTSESATPESGPGSEPATSGSETPGTSESATPESGPGSPAGSPTSTEEGSPAGSPTSTEEGTSTEPSEGSAPGTSESATPESGPGTSESATPESGPGTSESATPESGPGSEPATSGSETPGSEPATSGSETPGSPAGSPTSTEEGTSTEPSEGSAPGTSTEPSEGSAPGSEPATSGSETPGTSESATPESGPGTSTEPSEGSAPG

SEQ ID NO: 344 - protein, 927 aa, synthetic construct
  REGION 1..927: note = Description of Artificial Sequence: Synthetic polypeptide
MAEPAGSPTSTEEGTPGSGTASSSPGSSTPSGATGSPGASPGTSSTGSPGGPEPTCPAPSGGGSPAGSPTSTEEGTSESATPESGPGTSTEPSEGSAPGSPAGSPTSTEEGTSTEPSEGSAPGTSTEPSEGSAPGTSESATPESGPGSEPATSGSETPGSEPATSGSETPGSPAGSPTSTEEGTSESATPESGPGTSTEPSEGSAPGTSTEPSEGSAPGSPAGSPTSTEEGTSTEPSEGSAPGTSTEPSEGSAPGTSESATPESGPGTSTEPSEGSAPGTSESATPESGPGSEPATSGSETPGTSTEPSEGSAPGTSTEPSEGSAPGTSESATPESGPGTSESATPESGPGSPAGSPTSTEEGTSESATPESGPGSEPATSGSETPGTSESATPESGPGTSTEPSEGSAPGTSTEPSEGSAPGTSTEPSEGSAPGTSTEPSEGSAPGTSTEPSEGSAPGTSTEPSEGSAPGSPAGSPTSTEEGTSTEPSEGSAPGTSESATPESGPGSEPATSGSETPGTSESATPESGPGSEPATSGSETPGTSESATPESGPGTSTEPSEGSAPGTSESATPESGPGSPAGSPTSTEEGSPAGSPTSTEEGSPAGSPTSTEEGTSESATPESGPGTSTEPSEGSAPGTSESATPESGPGSEPATSGSETPGTSESATPESGPGSEPATSGSETPGTSESATPESGPGTSTEPSEGSAPGSPAGSPTSTEEGTSESATPESGPGSEPATSGSETPGTSESATPESGPGSPAGSPTSTEEGSPAGSPTSTEEGTSTEPSEGSAPGTSESATPESGPGTSESATPESGPGTSESATPESGPGSEPATSGSETPGSEPATSGSETPGSPAGSPTSTEEGTSTEPSEGSAPGTSTEPSEGSAPGSEPATSGSETPGTSESATPESGPGTSTEPSEGSAPG

SEQ ID NO: 345 - protein, 891 aa, synthetic construct
  REGION 1..891: note = Description of Artificial Sequence: Synthetic polypeptide
GTSESATPESGPGSEPATSGSETPGTSESATPESGPGSEPATSGSETPGTSESATPESGPGTSTEPSEGSAPGSPAGSPTSTEEGTSESATPESGPGSEPATSGSETPGTSESATPESGPGSPAGSPTSTEEGSPAGSPTSTEEGTSTEPSEGSAPGTSESATPESGPGTSESATPESGPGTSESATPESGPGSEPATSGSETPGSEPATSGSETPGSPAGSPTSTEEGTSTEPSEGSAPGTSTEPSEGSAPGSEPATSGSETPGTSESATPESGPGTSTEPSEGSAPGGGSPAGSCTSPGGTSESATPESGPGSEPATSGSETPGTSESATPESGPGSEPATSGSETPGTSESATPESGPGTSTEPSEGSAPGSPAGSPTSTEEGTSESATPESGPGSEPATSGSETPGTSESATPESGPGSPAGSPTSTEEGSPAGSPTSTEEGTSTEPSEGSAPGTSESATPESGPGTSESATPESGPGTSESATPESGPGSEPATSGSETPGSEPATSGSETPGSPAGSPTSTEEGTSTEPSEGSAPGTSTEPSEGSAPGSEPATSGSETPGTSESATPESGPGTSTEPSEGSAPGGGSPAGSCTSPGGTSESATPESGPGSEPATSGSETPGTSESATPESGPGSEPATSGSETPGTSESATPESGPGTSTEPSEGSAPGSPAGSPTSTEEGTSESATPESGPGSEPATSGSETPGTSESATPESGPGSPAGSPTSTEEGSPAGSPTSTEEGTSTEPSEGSAPGTSESATPESGPGTSESATPESGPGTSESATPESGPGSEPATSGSETPGSEPATSGSETPGSPAGSPTSTEEGTSTEPSEGSAPGTSTEPSEGSAPGSEPATSGSETPGTSESATPESGPGTSTEPSEGSAPG

SEQ ID NO: 346 - protein, 796 aa, synthetic construct
  REGION 1..796: note = Description of Artificial Sequence: Synthetic polypeptide
MAEPAGSPTSTEEGTPGSGTASSSPGSSTPSGATGSPGASPGTSSTGSPGGASASCAPSTGGGSPAGSPTSTEEGTSESATPESGPGTSTEPSEGSAPGSPAGSPTSTEEGTSTEPSEGSAPGTSTEPSEGSAPGTSESATPESGPGSEPATSGSETPGSEPATSGSETPGSPAGSPTSTEEGTSESATPESGPGTSTEPSEGSAPGTSTEPSEGSAPGSPAGSPTSTEEGTSTEPSEGSAPGTSTEPSEGSAPGTSESATPESGPGTSTEPSEGSAPGTSESATPESGPGSEPATSGSETPGTSTEPSEGSAPGTSTEPSEGSAPGTSESATPESGPGTSESATPESGPGSPAGSPTSTEEGTSESATPESGPGSEPATSGSETPGTSESATPESGPGTSTEPSEGSAPGTSTEPSEGSAPGTSTEPSEGSAPGTSTEPSEGSAPGTSTEPSEGSAPGTSTEPSEGSAPGSPAGSPTSTEEGTSTEPSEGSAPGTSESATPESGPGSEPATSGSETPGTSESATPESGPGSEPATSGSETPGTSESATPESGPGTSTEPSEGSAPGTSESATPESGPGSPAGSPTSTEEGSPAGSPTSTEEGSPAGSPTSTEEGTSESATPESGPGTSTEPSEGSAPGGASASCAPSTGGGSEPATSGSETPGTSESATPESGPGSEPATSGSETPGSPAGSPTSTEEGTSTEPSEGSAPGSEPATSGSETPGSEPATSGSETPGSEPATSGSETPGTSTEPSEGSAPGTSESATPESGPGSEPATSGSETPGTSTEPSEGSAPG

SEQ ID NO: 347 - protein, 938 aa, synthetic construct
  REGION 1..938: note = Description of Artificial Sequence: Synthetic polypeptide
MAEPAGSPTSTEEGASPGTSSTGSPGSSTPSGATGSPGSSTPSGATGSPGGGSPAGSCTSPGGTSTEPSEGSAPGSEPATSGSETPGSPAGSPTSTEEGSTSSTAESPGPGTSTPESGSASPGSTSESPSGTAPGSTSESPSGTAPGTSTPESGSASPGTSTPESGSASPGSEPATSGSETPGTSESATPESGPGSPAGSPTSTEEGTSTEPSEGSAPGTSESATPESGPGTSTEPSEGSAPGTSTEPSEGSAPGSPAGSPTSTEEGTSTEPSEGSAPGTSTEPSEGSAPGTSESATPESGPGTSESATPESGPGTSTEPSEGSAPGTSTEPSEGSAPGTSESATPESGPGTSTEPSEGSAPGSEPATSGSETPGSPAGSPTSTEEGSSTPSGATGSPGTPGSGTASSSPGSSTPSGATGSPGTSTEPSEGSAPGTSTEPSEGSAPGSEPATSGSETPGSPAGSPTSTEEGSPAGSPTSTEEGTSTEPSEGSAPGASASGAPSTGGTSESATPESGPGSPAGSPTSTEEGSPAGSPTSTEEGSTSSTAESPGPGSTSESPSGTAPGTSPSGESSTAPGTPGSGTASSSPGSSTPSGATGSPGSSPSASTGTGPGSEPATSGSETPGTSESATPESGPGSEPATSGSETPGSTSSTAESPGPGSTSSTAESPGPGTSPSGESSTAPGSEPATSGSETPGSEPATSGSETPGTSTEPSEGSAPGSTSSTAESPGPGTSTPESGSASPGSTSESPSGTAPGTSTEPSEGSAPGTSTEPSEGSAPGTSTEPSEGSAPGSSTPSGATGSPGSSPSASTGTGPGASPGTSSTGSPGSEPATSGSETPGTSESATPESGPGSPAGSPTSTEEGSSTPSGATGSPGSSPSASTGTGPGASPGTSSTGSPGTSESATPESGPGTSTEPSEGSAPGTSTEPSEGSAPG

SEQ ID NO: 348 - protein, 1381 aa, synthetic construct
  REGION 1..1381: note = Description of Artificial Sequence: Synthetic polypeptide
MAEPAGSPTSTEEGASPGTSSTGSPGSSTPSGATGSPGSSTPSGATGSPGGASASCAPSTGGGTSTEPSEGSAPGSEPATSGSETPGSPAGSPTSTEEGSTSSTAESPGPGTSTPESGSASPGSTSESPSGTAPGSTSESPSGTAPGTSTPESGSASPGTSTPESGSASPGSEPATSGSETPGTSESATPESGPGSPAGSPTSTEEGTSTEPSEGSAPGTSESATPESGPGTSTEPSEGSAPGTSTEPSEGSAPGSPAGSPTSTEEGTSTEPSEGSAPGTSTEPSEGSAPGTSESATPESGPGTSESATPESGPGTSTEPSEGSAPGTSTEPSEGSAPGTSESATPESGPGTSTEPSEGSAPGSEPATSGSETPGSPAGSPTSTEEGSSTPSGATGSPGTPGSGTASSSPGSSTPSGATGSPGTSTEPSEGSAPGTSTEPSEGSAPGSEPATSGSETPGSPAGSPTSTEEGSPAGSPTSTEEGTSTEPSEGSAPGPEPTGPAPSGGSEPATSGSETPGTSESATPESGPGSPAGSPTSTEEGTSESATPESGPGSPAGSPTSTEEGSPAGSPTSTEEGTSESATPESGPGSPAGSPTSTEEGSPAGSPTSTEEGSTSSTAESPGPGSTSESPSGTAPGTSPSGESSTAPGSTSESPSGTAPGSTSESPSGTAPGTSPSGESSTAPGTSTEPSEGSAPGTSESATPESGPGTSESATPESGPGSEPATSGSETPGTSESATPESGPGTSESATPESGPGTSTEPSEGSAPGTSESATPESGPGTSTEPSEGSAPGTSPSGESSTAPGTSPSGESSTAPGTSPSGESSTAPGTSTEPSEGSAPGSPAGSPTSTEEGTSTEPSEGSAPGSSPSASTGTGPGSSTPSGATGSPGSSTPSGATGSPGSSTPSGATGSPGSSTPSGATGSPGASPGTSSTGSPGASASGAPSTGGTSPSGESSTAPGSTSSTAESPGPGTSPSGESSTAPGTSESATPESGPGTSTEPSEGSAPGTSTEPSEGSAPGSSPSASTGTGPGSSTPSGATGSPGASPGTSSTGSPGTSTPESGSASPGTSPSGESSTAPGTSPSGESSTAPGTSESATPESGPGSEPATSGSETPGTSTEPSEGSAPGSTSESPSGTAPGSTSESPSGTAPGTSTPESGSASPGSPAGSPTSTEEGTSESATPESGPGTSTEPSEGSAPGSPAGSPTSTEEGTSESATPESGPGSEPATSGSETPGSSTPSGATGSPGASPGTSSTGSPGSSTPSGATGSPGSTSESPSGTAPGTSPSGESSTAPGSTSSTAESPGPGSSTPSGATGSPGASPGTSSTGSPGTPGSGTASSSPGSPAGSPTSTEEGSPAGSPTSTEEGTSTEPSEGSAPG

SEQ ID NO: 349 - protein, 938 aa, synthetic construct
  REGION 1..938: note = Description of Artificial Sequence: Synthetic polypeptide
MAEPAGSPTSTEEGASPGTSSTGSPGSSTPSGATGSPGSSTPSGATGSPGGPEPTCPAPSGGGTSTEPSEGSAPGSEPATSGSETPGSPAGSPTSTEEGSTSSTAESPGPGTSTPESGSASPGSTSESPSGTAPGSTSESPSGTAPGTSTPESGSASPGTSTPESGSASPGSEPATSGSETPGTSESATPESGPGSPAGSPTSTEEGTSTEPSEGSAPGTSESATPESGPGTSTEPSEGSAPGTSTEPSEGSAPGSPAGSPTSTEEGTSTEPSEGSAPGTSTEPSEGSAPGTSESATPESGPGTSESATPESGPGTSTEPSEGSAPGTSTEPSEGSAPGTSESATPESGPGTSTEPSEGSAPGSEPATSGSETPGSPAGSPTSTEEGSSTPSGATGSPGTPGSGTASSSPGSSTPSGATGSPGTSTEPSEGSAPGTSTEPSEGSAPGSEPATSGSETPGSPAGSPTSTEEGSPAGSPTSTEEGTSTEPSEGSAPGASASGAPSTGGTSESATPESGPGSPAGSPTSTEEGSPAGSPTSTEEGSTSSTAESPGPGSTSESPSGTAPGTSPSGESSTAPGTPGSGTASSSPGSSTPSGATGSPGSSPSASTGTGPGSEPATSGSETPGTSESATPESGPGSEPATSGSETPGSTSSTAESPGPGSTSSTAESPGPGTSPSGESSTAPGSEPATSGSETPGSEPATSGSETPGTSTEPSEGSAPGSTSSTAESPGPGTSTPESGSASPGSTSESPSGTAPGTSTEPSEGSAPGTSTEPSEGSAPGTSTEPSEGSAPGSSTPSGATGSPGSSPSASTGTGPGASPGTSSTGSPGSEPATSGSETPGTSESATPESGPGSPAGSPTSTEEGSSTPSGATGSPGSSPSASTGTGPGASPGTSSTGSPGTSESATPESGPGTSTEPSEGSAPGTSTEPSEGSAPG

SEQ ID NO: 350 - protein, 1000 aa, synthetic construct
  REGION 1..1000: note = Description of Artificial Sequence: Synthetic polypeptide
MAEPAGSPTSTEEGASPGTSSTGSPGSSTPSGATGSPGSSTPSGATGSPGGPEPTCPAPSGGGTSTEPSEGSAPGSEPATSGSETPGSPAGSPTSTEEGSTSSTAESPGPGTSTPESGSASPGSTSESPSGTAPGSTSESPSGTAPGTSTPESGSASPGTSTPESGSASPGSEPATSGSETPGTSESATPESGPGSPAGSPTSTEEGTSTEPSEGSAPGTSESATPESGPGTSTEPSEGSAPGTSTEPSEGSAPGSPAGSPTSTEEGTSTEPSEGSAPGTSTEPSEGSAPGTSESATPESGPGTSESATPESGPGTSTEPSEGSAPGTSTEPSEGSAPGTSESATPESGPGTSTEPSEGSAPGSEPATSGSETPGSPAGSPTSTEEGSSTPSGATGSPGTPGSGTASSSPGSSTPSGATGSPGTSTEPSEGSAPGTSTEPSEGSAPGSEPATSGSETPGSPAGSPTSTEEGSPAGSPTSTEEGTSTEPSEGSAPGASASGAPSTGGTSESATPESGPGSPAGSPTSTEEGSPAGSPTSTEEGSTSSTAESPGPGSTSESPSGTAPGTSPSGESSTAPGTPGSGTASSSPGSSTPSGATGSPGSSPSASTGTGPGSEPATSGSETPGTSESATPESGPGSEPATSGSETPGSTSSTAESPGPGSTSSTAESPGPGTSPSGESSTAPGSEPATSGSETPGSEPATSGSETPGTSTEPSEGSAPGSTSSTAESPGPGTSTPESGSASPGSTSESPSGTAPGTSTEPSEGSAPGTSTEPSEGSAPGTSTEPSEGSAPGSSTPSGATGSPGSSPSASTGTGPGASPGTSSTGSPGSEPATSGSETPGTSESATPESGPGSPAGSPTSTEEGSSTPSGATGSPGSSPSASTGTGPGASPGTSSTGSPGTSESATPESGPGTSTEPSEGSAPGTSTEPSEGSAPGGPEPTCPAPSGGMAEPAGSPTSTEEGASPGTSSTGSPGSSTPSGATGSPGSSTPSGATGSPG

SEQ ID NO: 351 - protein, 734 aa, synthetic construct
  REGION 1..734: note = Description of Artificial Sequence: Synthetic polypeptide
GSEPATSGSETPGTSESATPESGPGSEPATSGSETPGSPAGSPTSTEEGTSTEPSEGSAPGSEPATSGSETPGSEPATSGSETPGSEPATSGSETPGTSTEPSEGSAPGTSESATPESGPGSEPATSGSETPGTSTEPSEGSAPGGGSPAGSKTSPGGSPAGSPTSTEEGTSESATPESGPGTSTEPSEGSAPGSPAGSPTSTEEGTSTEPSEGSAPGTSTEPSEGSAPGTSESATPESGPGSEPATSGSETPGSEPATSGSETPGSPAGSPTSTEEGTSESATPESGPGTSTEPSEGSAPGTSTEPSEGSAPGSPAGSPTSTEEGTSTEPSEGSAPGTSTEPSEGSAPGTSESATPESGPGTSTEPSEGSAPGTSESATPESGPGSEPATSGSETPGTSTEPSEGSAPGTSTEPSEGSAPGTSESATPESGPGTSESATPESGPGSPAGSPTSTEEGTSESATPESGPGSEPATSGSETPGTSESATPESGPGTSTEPSEGSAPGTSTEPSEGSAPGTSTEPSEGSAPGTSTEPSEGSAPGTSTEPSEGSAPGTSTEPSEGSAPGSPAGSPTSTEEGTSTEPSEGSAPGTSESATPESGPGSEPATSGSETPGTSESATPESGPGSEPATSGSETPGTSESATPESGPGTSTEPSEGSAPGTSESATPESGPGSPAGSPTSTEEGSPAGSPTSTEEGSPAGSPTSTEEGTSESATPESGPGTSTEPSEGSAPG

SEQ ID NO: 352 - protein, 1071 aa, synthetic construct
  REGION 1..1071: note = Description of Artificial Sequence: Synthetic polypeptide
MAEPAGSPTSTEEGTPGSGTASSSPGSSTPSGATGSPGASPGTSSTGSPGSPAGSPTSTEEGTSESATPESGPGTSTEPSEGSAPGSPAGSPTSTEEGTSTEPSEGSAPGTSTEPSEGSAPGTSESATPESGPGSEPATSGSETPGSEPATSGSETPGSPAGSPTSTEEGTSESATPESGPGTSTEPSEGSAPGTSTEPSEGSAPGSPAGSPTSTEEGTSTEPSEGSAPGTSTEPSEGSAPGTSESATPESGPGTSTEPSEGSAPGTSESATPESGPGSEPATSGSETPGTSTEPSEGSAPGTSTEPSEGSAPGTSESATPESGPGTSESATPESGPGSPAGSPTSTEEGTSESATPESGPGSEPATSGSETPGTSESATPESGPGTSTEPSEGSAPGTSTEPSEGSAPGTSTEPSEGSAPGTSTEPSEGSAPGTSTEPSEGSAPGTSTEPSEGSAPGSPAGSPTSTEEGTSTEPSEGSAPGTSESATPESGPGSEPATSGSETPGTSESATPESGPGSEPATSGSETPGTSESATPESGPGTSTEPSEGSAPGTSESATPESGPGSPAGSPTSTEEGSPAGSPTSTEEGSPAGSPTSTEEGTSESATPESGPGTSTEPSEGSAPGTSESATPESGPGSEPATSGSETPGTSESATPESGPGSEPATSGSETPGTSESATPESGPGTSTEPSEGSAPGSPAGSPTSTEEGTSESATPESGPGSEPATSGSETPGTSESATPESGPGSPAGSPTSTEEGSPAGSPTSTEEGTSTEPSEGSAPGTSESATPESGPGTSESATPESGPGTSESATPESGPGSEPATSGSETPGSEPATSGSETPGSPAGSPTSTEEGTSTEPSEGSAPGTSTEPSEGSAPGSEPATSGSETPGTSESATPESGPGTSTEPSEGSAPGGASASKAPSTGGGSEPATSGSETPGTSESATPESGPGSEPATSGSETPGSPAGSPTSTEEGTSTEPSEGSAPGSEPATSGSETPGSEPATSGSETPGSEPATSGSETPGTSTEPSEGSAPGTSESATPESGPGSEPATSGSETPGTSTEPSEGSAPG

SEQ ID NO: 353 - protein, 878 aa, synthetic construct
  REGION 1..878: note = Description of Artificial Sequence: Synthetic polypeptide
GSPAGSPTSTEEGTSESATPESGPGTSTEPSEGSAPGSPAGSPTSTEEGTSTEPSEGSAPGTSTEPSEGSAPGTSESATPESGPGSEPATSGSETPGSEPATSGSETPGSPAGSPTSTEEGTSESATPESGPGTSTEPSEGSAPGTSTEPSEGSAPGSPAGSPTSTEEGTSTEPSEGSAPGTSTEPSEGSAPGTSESATPESGPGTSTEPSEGSAPGTSESATPESGPGSEPATSGSETPGTSTEPSEGSAPGTSTEPSEGSAPGTSESATPESGPGTSESATPESGPGSPAGSPTSTEEGTSESATPESGPGSEPATSGSETPGTSESATPESGPGTSTEPSEGSAPGTSTEPSEGSAPGTSTEPSEGSAPGTSTEPSEGSAPGTSTEPSEGSAPGTSTEPSEGSAPGSPAGSPTSTEEGTSTEPSEGSAPGTSESATPESGPGSEPATSGSETPGTSESATPESGPGSEPATSGSETPGTSESATPESGPGTSTEPSEGSAPGTSESATPESGPGSPAGSPTSTEEGSPAGSPTSTEEGSPAGSPTSTEEGTSESATPESGPGTSTEPSEGSAPGGGSPAGSKTSPGGTSESATPESGPGSEPATSGSETPGTSESATPESGPGSEPATSGSETPGTSESATPESGPGTSTEPSEGSAPGSPAGSPTSTEEGTSESATPESGPGSEPATSGSETPGTSESATPESGPGSPAGSPTSTEEGSPAGSPTSTEEGTSTEPSEGSAPGTSESATPESGPGTSESATPESGPGTSESATPESGPGSEPATSGSETPGSEPATSGSETPGSPAGSPTSTEEGTSTEPSEGSAPGTSTEPSEGSAPGSEPATSGSETPGTSESATPESGPGTSTEPSEGSAPG

SEQ ID NO: 354 - protein, 927 aa, synthetic construct
  REGION 1..927: note = Description of Artificial Sequence: Synthetic polypeptide
MAEPAGSPTSTEEGTPGSGTASSSPGSSTPSGATGSPGASPGTSSTGSPGGASASKAPSTGGGSPAGSPTSTEEGTSESATPESGPGTSTEPSEGSAPGSPAGSPTSTEEGTSTEPSEGSAPGTSTEPSEGSAPGTSESATPESGPGSEPATSGSETPGSEPATSGSETPGSPAGSPTSTEEGTSESATPESGPGTSTEPSEGSAPGTSTEPSEGSAPGSPAGSPTSTEEGTSTEPSEGSAPGTSTEPSEGSAPGTSESATPESGPGTSTEPSEGSAPGTSESATPESGPGSEPATSGSETPGTSTEPSEGSAPGTSTEPSEGSAPGTSESATPESGPGTSESATPESGPGSPAGSPTSTEEGTSESATPESGPGSEPATSGSETPGTSESATPESGPGTSTEPSEGSAPGTSTEPSEGSAPGTSTEPSEGSAPGTSTEPSEGSAPGTSTEPSEGSAPGTSTEPSEGSAPGSPAGSPTSTEEGTSTEPSEGSAPGTSESATPESGPGSEPATSGSETPGTSESATPESGPGSEPATSGSETPGTSESATPESGPGTSTEPSEGSAPGTSESATPESGPGSPAGSPTSTEEGSPAGSPTSTEEGSPAGSPTSTEEGTSESATPESGPGTSTEPSEGSAPGTSESATPESGPGSEPATSGSETPGTSESATPESGPGSEPATSGSETPGTSESATPESGPGTSTEPSEGSAPGSPAGSPTSTEEGTSESATPESGPGSEPATSGSETPGTSESATPESGPGSPAGSPTSTEEGSPAGSPTSTEEGTSTEPSEGSAPGTSESATPESGPGTSESATPESGPGTSESATPESGPGSEPATSGSETPGSEPATSGSETPGSPAGSPTSTEEGTSTEPSEGSAPGTSTEPSEGSAPGSEPATSGSETPGTSESATPESGPGTSTEPSEGSAPG

SEQ ID NO: 355 - protein, 891 aa, synthetic construct
  REGION 1..891: note = Description of Artificial Sequence: Synthetic polypeptide
GTSESATPESGPGSEPATSGSETPGTSESATPESGPGSEPATSGSETPGTSESATPESGPGTSTEPSEGSAPGSPAGSPTSTEEGTSESATPESGPGSEPATSGSETPGTSESATPESGPGSPAGSPTSTEEGSPAGSPTSTEEGTSTEPSEGSAPGTSESATPESGPGTSESATPESGPGTSESATPESGPGSEPATSGSETPGSEPATSGSETPGSPAGSPTSTEEGTSTEPSEGSAPGTSTEPSEGSAPGSEPATSGSETPGTSESATPESGPGTSTEPSEGSAPGGGSPAGSKTSPGGTSESATPESGPGSEPATSGSETPGTSESATPESGPGSEPATSGSETPGTSESATPESGPGTSTEPSEGSAPGSPAGSPTSTEEGTSESATPESGPGSEPATSGSETPGTSESATPESGPGSPAGSPTSTEEGSPAGSPTSTEEGTSTEPSEGSAPGTSESATPESGPGTSESATPESGPGTSESATPESGPGSEPATSGSETPGSEPATSGSETPGSPAGSPTSTEEGTSTEPSEGSAPGTSTEPSEGSAPGSEPATSGSETPGTSESATPESGPGTSTEPSEGSAPGGGSPAGSKTSPGGTSESATPESGPGSEPATSGSETPGTSESATPESGPGSEPATSGSETPGTSESATPESGPGTSTEPSEGSAPGSPAGSPTSTEEGTSESATPESGPGSEPATSGSETPGTSESATPESGPGSPAGSPTSTEEGSPAGSPTSTEEGTSTEPSEGSAPGTSESATPESGPGTSESATPESGPGTSESATPESGPGSEPATSGSETPGSEPATSGSETPGSPAGSPTSTEEGTSTEPSEGSAPGTSTEPSEGSAPGSEPATSGSETPGTSESATPESGPGTSTEPSEGSAPG

SEQ ID NO: 356 - protein, 796 aa, synthetic construct
  REGION 1..796: note = Description of Artificial Sequence: Synthetic polypeptide
MAEPAGSPTSTEEGTPGSGTASSSPGSSTPSGATGSPGASPGTSSTGSPGGGSPAGSKTSPGGSPAGSPTSTEEGTSESATPESGPGTSTEPSEGSAPGSPAGSPTSTEEGTSTEPSEGSAPGTSTEPSEGSAPGTSESATPESGPGSEPATSGSETPGSEPATSGSETPGSPAGSPTSTEEGTSESATPESGPGTSTEPSEGSAPGTSTEPSEGSAPGSPAGSPTSTEEGTSTEPSEGSAPGTSTEPSEGSAPGTSESATPESGPGTSTEPSEGSAPGTSESATPESGPGSEPATSGSETPGTSTEPSEGSAPGTSTEPSEGSAPGTSESATPESGPGTSESATPESGPGSPAGSPTSTEEGTSESATPESGPGSEPATSGSETPGTSESATPESGPGTSTEPSEGSAPGTSTEPSEGSAPGTSTEPSEGSAPGTSTEPSEGSAPGTSTEPSEGSAPGTSTEPSEGSAPGSPAGSPTSTEEGTSTEPSEGSAPGTSESATPESGPGSEPATSGSETPGTSESATPESGPGSEPATSGSETPGTSESATPESGPGTSTEPSEGSAPGTSESATPESGPGSPAGSPTSTEEGSPAGSPTSTEEGSPAGSPTSTEEGTSESATPESGPGTSTEPSEGSAPGGGSPAGSKTSPGGSEPATSGSETPGTSESATPESGPGSEPATSGSETPGSPAGSPTSTEEGTSTEPSEGSAPGSEPATSGSETPGSEPATSGSETPGSEPATSGSETPGTSTEPSEGSAPGTSESATPESGPGSEPATSGSETPGTSTEPSEGSAPG

SEQ ID NO: 357 - protein, 938 aa, synthetic construct
  REGION 1..938: note = Description of Artificial Sequence: Synthetic polypeptide
MAEPAGSPTSTEEGASPGTSSTGSPGSSTPSGATGSPGSSTPSGATGSPGGGSPAGSKTSPGGTSTEPSEGSAPGSEPATSGSETPGSPAGSPTSTEEGSTSSTAESPGPGTSTPESGSASPGSTSESPSGTAPGSTSESPSGTAPGTSTPESGSASPGTSTPESGSASPGSEPATSGSETPGTSESATPESGPGSPAGSPTSTEEGTSTEPSEGSAPGTSESATPESGPGTSTEPSEGSAPGTSTEPSEGSAPGSPAGSPTSTEEGTSTEPSEGSAPGTSTEPSEGSAPGTSESATPESGPGTSESATPESGPGTSTEPSEGSAPGTSTEPSEGSAPGTSESATPESGPGTSTEPSEGSAPGSEPATSGSETPGSPAGSPTSTEEGSSTPSGATGSPGTPGSGTASSSPGSSTPSGATGSPGTSTEPSEGSAPGTSTEPSEGSAPGSEPATSGSETPGSPAGSPTSTEEGSPAGSPTSTEEGTSTEPSEGSAPGASASGAPSTGGTSESATPESGPGSPAGSPTSTEEGSPAGSPTSTEEGSTSSTAESPGPGSTSESPSGTAPGTSPSGESSTAPGTPGSGTASSSPGSSTPSGATGSPGSSPSASTGTGPGSEPATSGSETPGTSESATPESGPGSEPATSGSETPGSTSSTAESPGPGSTSSTAESPGPGTSPSGESSTAPGSEPATSGSETPGSEPATSGSETPGTSTEPSEGSAPGSTSSTAESPGPGTSTPESGSASPGSTSESPSGTAPGTSTEPSEGSAPGTSTEPSEGSAPGTSTEPSEGSAPGSSTPSGATGSPGSSPSASTGTGPGASPGTSSTGSPGSEPATSGSETPGTSESATPESGPGSPAGSPTSTEEGSSTPSGATGSPGSSPSASTGTGPGASPGTSSTGSPGTSESATPESGPGTSTEPSEGSAPGTSTEPSEGSAPG

SEQ ID NO: 358 - protein, 1381 aa, synthetic construct
  REGION 1..1381: note = Description of Artificial Sequence: Synthetic polypeptide
MAEPAGSPTSTEEGASPGTSSTGSPGSSTPSGATGSPGSSTPSGATGSPGGASASKAPSTGGGTSTEPSEGSAPGSEPATSGSETPGSPAGSPTSTEEGSTSSTAESPGPGTSTPESGSASPGSTSESPSGTAPGSTSESPSGTAPGTSTPESGSASPGTSTPESGSASPGSEPATSGSETPGTSESATPESGPGSPAGSPTSTEEGTSTEPSEGSAPGTSESATPESGPGTSTEPSEGSAPGTSTEPSEGSAPGSPAGSPTSTEEGTSTEPSEGSAPGTSTEPSEGSAPGTSESATPESGPGTSESATPESGPGTSTEPSEGSAPGTSTEPSEGSAPGTSESATPESGPGTSTEPSEGSAPGSEPATSGSETPGSPAGSPTSTEEGSSTPSGATGSPGTPGSGTASSSPGSSTPSGATGSPGTSTEPSEGSAPGTSTEPSEGSAPGSEPATSGSETPGSPAGSPTSTEEGSPAGSPTSTEEGTSTEPSEGSAPGPEPTGPAPSGGSEPATSGSETPGTSESATPESGPGSPAGSPTSTEEGTSESATPESGPGSPAGSPTSTEEGSPAGSPTSTEEGTSESATPESGPGSPAGSPTSTEEGSPAGSPTSTEEGSTSSTAESPGPGSTSESPSGTAPGTSPSGESSTAPGSTSESPSGTAPGSTSESPSGTAPGTSPSGESSTAPGTSTEPSEGSAPGTSESATPESGPGTSESATPESGPGSEPATSGSETPGTSESATPESGPGTSESATPESGPGTSTEPSEGSAPGTSESATPESGPGTSTEPSEGSAPGTSPSGESSTAPGTSPSGESSTAPGTSPSGESSTAPGTSTEPSEGSAPGSPAGSPTSTEEGTSTEPSEGSAPGSSPSASTGTGPGSSTPSGATGSPGSSTPSGATGSPGSSTPSGATGSPGSSTPSGATGSPGASPGTSSTGSPGASASGAPSTGGTSPSGESSTAPGSTSSTAESPGPGTSPSGESSTAPGTSESATPESGPGTSTEPSEGSAPGTSTEPSEGSAPGSSPSASTGTGPGSSTPSGATGSPGASPGTSSTGSPGTSTPESGSASPGTSPSGESSTAPGTSPSGESSTAPGTSESATPESGPGSEPATSGSETPGTSTEPSEGSAPGSTSESPSGTAPGSTSESPSGTAPGTSTPESGSASPGSPAGSPTSTEEGTSESATPESGPGTSTEPSEGSAPGSPAGSPTSTEEGTSESATPESGPGSEPATSGSETPGSSTPSGATGSPGASPGTSSTGSPGSSTPSGATGSPGSTSESPSGTAPGTSPSGESSTAPGSTSSTAESPGPGSSTPSGATGSPGASPGTSSTGSPGTPGSGTASSSPGSPAGSPTSTEEGSPAGSPTSTEEGTSTEPSEGSAPG

SEQ ID NO: 359 - protein, 938 aa, synthetic construct
  REGION 1..938: note = Description of Artificial Sequence: Synthetic polypeptide
MAEPAGSPTSTEEGASPGTSSTGSPGSSTPSGATGSPGSSTPSGATGSPGGASASKAPSTGGGTSTEPSEGSAPGSEPATSGSETPGSPAGSPTSTEEGSTSSTAESPGPGTSTPESGSASPGSTSESPSGTAPGSTSESPSGTAPGTSTPESGSASPGTSTPESGSASPGSEPATSGSETPGTSESATPESGPGSPAGSPTSTEEGTSTEPSEGSAPGTSESATPESGPGTSTEPSEGSAPGTSTEPSEGSAPGSPAGSPTSTEEGTSTEPSEGSAPGTSTEPSEGSAPGTSESATPESGPGTSESATPESGPGTSTEPSEGSAPGTSTEPSEGSAPGTSESATPESGPGTSTEPSEGSAPGSEPATSGSETPGSPAGSPTSTEEGSSTPSGATGSPGTPGSGTASSSPGSSTPSGATGSPGTSTEPSEGSAPGTSTEPSEGSAPGSEPATSGSETPGSPAGSPTSTEEGSPAGSPTSTEEGTSTEPSEGSAPGASASGAPSTGGTSESATPESGPGSPAGSPTSTEEGSPAGSPTSTEEGSTSSTAESPGPGSTSESPSGTAPGTSPSGESSTAPGTPGSGTASSSPGSSTPSGATGSPGSSPSASTGTGPGSEPATSGSETPGTSESATPESGPGSEPATSGSETPGSTSSTAESPGPGSTSSTAESPGPGTSPSGESSTAPGSEPATSGSETPGSEPATSGSETPGTSTEPSEGSAPGSTSSTAESPGPGTSTPESGSASPGSTSESPSGTAPGTSTEPSEGSAPGTSTEPSEGSAPGTSTEPSEGSAPGSSTPSGATGSPGSSPSASTGTGPGASPGTSSTGSPGSEPATSGSETPGTSESATPESGPGSPAGSPTSTEEGSSTPSGATGSPGSSPSASTGTGPGASPGTSSTGSPGTSESATPESGPGTSTEPSEGSAPGTSTEPSEGSAPG

SEQ ID NO: 360 - protein, 1000 aa, synthetic construct
  REGION 1..1000: note = Description of Artificial Sequence: Synthetic polypeptide
MAEPAGSPTSTEEGASPGTSSTGSPGSSTPSGATGSPGSSTPSGATGSPGGASASKAPSTGGGTSTEPSEGSAPGSEPATSGSETPGSPAGSPTSTEEGSTSSTAESPGPGTSTPESGSASPGSTSESPSGTAPGSTSESPSGTAPGTSTPESGSASPGTSTPESGSASPGSEPATSGSETPGTSESATPESGPGSPAGSPTSTEEGTSTEPSEGSAPGTSESATPESGPGTSTEPSEGSAPGTSTEPSEGSAPGSPAGSPTSTEEGTSTEPSEGSAPGTSTEPSEGSAPGTSESATPESGPGTSESATPESGPGTSTEPSEGSAPGTSTEPSEGSAPGTSESATPESGPGTSTEPSEGSAPGSEPATSGSETPGSPAGSPTSTEEGSSTPSGATGSPGTPGSGTASSSPGSSTPSGATGSPGTSTEPSEGSAPGTSTEPSEGSAPGSEPATSGSETPGSPAGSPTSTEEGSPAGSPTSTEEGTSTEPSEGSAPGASASGAPSTGGTSESATPESGPGSPAGSPTSTEEGSPAGSPTSTEEGSTSSTAESPGPGSTSESPSGTAPGTSPSGESSTAPGTPGSGTASSSPGSSTPSGATGSPGSSPSASTGTGPGSEPATSGSETPGTSESATPESGPGSEPATSGSETPGSTSSTAESPGPGSTSSTAESPGPGTSPSGESSTAPGSEPATSGSETPGSEPATSGSETPGTSTEPSEGSAPGSTSSTAESPGPGTSTPESGSASPGSTSESPSGTAPGTSTEPSEGSAPGTSTEPSEGSAPGTSTEPSEGSAPGSSTPSGATGSPGSSPSASTGTGPGASPGTSSTGSPGSEPATSGSETPGTSESATPESGPGSPAGSPTSTEEGSSTPSGATGSPGSSPSASTGTGPGASPGTSSTGSPGTSESATPESGPGTSTEPSEGSAPGTSTEPSEGSAPGGASASKAPSTGGMAEPAGSPTSTEEGASPGTSSTGSPGSSTPSGATGSPGSSTPSGATGSPG

SEQ ID NO: 361 - protein, 891 aa, synthetic construct
  REGION 1..891: note = Description of Artificial Sequence: Synthetic polypeptide
GTSESATPESGPGSEPATSGSETPGTSESATPESGPGSEPATSGSETPGTSESATPESGPGTSTEPSEGSAPGSPAGSPTSTEEGTSESATPESGPGSEPATSGSETPGTSESATPESGPGSPAGSPTSTEEGSPAGSPTSTEEGTSTEPSEGSAPGTSESATPESGPGTSESATPESGPGTSESATPESGPGSEPATSGSETPGSEPATSGSETPGSPAGSPTSTEEGTSTEPSEGSAPGTSTEPSEGSAPGSEPATSGSETPGTSESATPESGPGTSTEPSEGSAPGGGSPAGSCTSPGGTSESATPESGPGSEPATSGSETPGTSESATPESGPGSEPATSGSETPGTSESATPESGPGTSTEPSEGSAPGSPAGSPTSTEEGTSESATPESGPGSEPATSGSETPGTSESATPESGPGSPAGSPTSTEEGSPAGSPTSTEEGTSTEPSEGSAPGTSESATPESGPGTSESATPESGPGTSESATPESGPGSEPATSGSETPGSEPATSGSETPGSPAGSPTSTEEGTSTEPSEGSAPGTSTEPSEGSAPGSEPATSGSETPGTSESATPESGPGTSTEPSEGSAPGGGSPAGSKTSPGGTSESATPESGPGSEPATSGSETPGTSESATPESGPGSEPATSGSETPGTSESATPESGPGTSTEPSEGSAPGSPAGSPTSTEEGTSESATPESGPGSEPATSGSETPGTSESATPESGPGSPAGSPTSTEEGSPAGSPTSTEEGTSTEPSEGSAPGTSESATPESGPGTSESATPESGPGTSESATPESGPGSEPATSGSETPGSEPATSGSETPGSPAGSPTSTEEGTSTEPSEGSAPGTSTEPSEGSAPGSEPATSGSETPGTSESATPESGPGTSTEPSEGSAPG

SEQ ID NO: 362 - protein, 677 aa, synthetic construct
  REGION 1..677: note = Description of Artificial Sequence: Synthetic polypeptide
MAEPAGSPTSTEEGTPGSGTASSSPGSSTPSGATGSPGASPGTSSTGSPGGGSPAGSCTSPGGSEPATSGSETPGTSESATPESGPGSEPATSGSETPGSPAGSPTSTEEGTSTEPSEGSAPGSEPATSGSETPGSEPATSGSETPGSEPATSGSETPGTSTEPSEGSAPGTSESATPESGPGSEPATSGSETPGTSTEPSEGSAPGGGSPAGSCTSPGSEPATSGSETPGTSESATPESGPGSEPATSGSETPGSPAGSPTSTEEGTSTEPSEGSAPGSEPATSGSETPGSEPATSGSETPGSEPATSGSETPGTSTEPSEGSAPGTSESATPESGPGSEPATSGSETPGTSTEPSEGSAPGGGSPAGSCTSPGGSEPATSGSETPGTSESATPESGPGSEPATSGSETPGSPAGSPTSTEEGTSTEPSEGSAPGSEPATSGSETPGSEPATSGSETPGSEPATSGSETPGTSTEPSEGSAPGTSESATPESGPGSEPATSGSETPGTSTEPSEGSAPGGGSPAGSCTSPGGSEPATSGSETPGTSESATPESGPGSEPATSGSETPGSPAGSPTSTEEGTSTEPSEGSAPGSEPATSGSETPGSEPATSGSETPGSEPATSGSETPGTSTEPSEGSAPGTSESATPESGPGSEPATSGSETPGTSTEPSEGSAPG

SEQ ID NO: 363 - protein, 677 aa, synthetic construct
  REGION 1..677: note = Description of Artificial Sequence: Synthetic polypeptide
MAEPAGSPTSTEEGTPGSGTASSSPGSSTPSGATGSPGASPGTSSTGSPGGGSPAGSKTSPGGSEPATSGSETPGTSESATPESGPGSEPATSGSETPGSPAGSPTSTEEGTSTEPSEGSAPGSEPATSGSETPGSEPATSGSETPGSEPATSGSETPGTSTEPSEGSAPGTSESATPESGPGSEPATSGSETPGTSTEPSEGSAPGGGSPAGSKTSPGSEPATSGSETPGTSESATPESGPGSEPATSGSETPGSPAGSPTSTEEGTSTEPSEGSAPGSEPATSGSETPGSEPATSGSETPGSEPATSGSETPGTSTEPSEGSAPGTSESATPESGPGSEPATSGSETPGTSTEPSEGSAPGGGSPAGSKTSPGGSEPATSGSETPGTSESATPESGPGSEPATSGSETPGSPAGSPTSTEEGTSTEPSEGSAPGSEPATSGSETPGSEPATSGSETPGSEPATSGSETPGTSTEPSEGSAPGTSESATPESGPGSEPATSGSETPGTSTEPSEGSAPGGGSPAGSKTSPGGSEPATSGSETPGTSESATPESGPGSEPATSGSETPGSPAGSPTSTEEGTSTEPSEGSAPGSEPATSGSETPGSEPATSGSETPGSEPATSGSETPGTSTEPSEGSAPGTSESATPESGPGSEPATSGSETPGTSTEPSEGSAPG

SEQ ID NO: 364 - protein, 432 aa, synthetic construct
  REGION 1..432: note = Description of Artificial Sequence: Synthetic polypeptide
SAGSPTAEAAGCGTAEAAGTSESATPESGPGSEPATSGSETPGTSESATPESGPGTSTEPSEGSAPGTSESATPESGPGSPAGSPTSTEEGSPAGSPTSTEEGSPAGSPTSTEEGTSESATPESGPGTSTEPSEGSAPGTSESATPESGPGSEPATSGSETPGTSESATPESGPGSEPATSGSETPGTSESATPESGPGTSTEPSEGSAPTAEAAGCGTAEAAGSPAGSPTSTEEGTSESATPESGPGSEPATSGSETPGTSESATPESGPGSPAGSPTSTEEGSPAGSPTSTEEGTSTEPSEGSAPGTSESATPESGPGTSESATPESGPGTSESATPESGPGSEPATSGSETPGSEPATSGSETPGSPAGSPTSTEEGTSTEPSEGSAPGTSTEPSEGSAPGSEPATSGSETPTAEAAGCGTAEAASASR

SEQ ID NO: 365 - protein, 864 aa, synthetic construct
  REGION 1..864: note = Description of Artificial Sequence: Synthetic polypeptide
SAGSPGSPTSTEEGTSESATPESGPGTSTEPSEGSAPGSPAGSPTSTEEGTSTEPSEGSAPGTSTEPSEGSAPGTSESATPESGPGSEPATSGSETPGSEPATSGSETPGSPAGSPTSTEEGTSESATPESGPGTSTEPSEGSAGPTKPGTSTEPSEGSAPGSPAGSPTSTEEGTSTEPSEGSAPGTSTEPSEGSAPGTSESATPESGPGTSTEPSEGSAPGTSESATPESGPGSEPATSGSETPGTSTEPSEGSAPGTSTEPSEGSAPGTSESATPESGPGTSESATPESGPTKPGTSPTSTEEGTSESATPESGPGSEPATSGSETPGTSESATPESGPGTSTEPSEGSAPGTSTEPSEGSAPGTSTEPSEGSAPGTSTEPSEGSAPGTSTEPSEGSAPGTSTEPSEGSAPGSPAGSPTSTEEGTSTEPSEGSAPTAEAAGCGTAEAAGTSESATPESGPGSEPATSGSETPGTSESATPESGPGTSTEPSEGSAPGTSESATPESGPGSPAGSPTSTEEGSPAGSPTSTEEGSPAGSPTSTEEGTSESATPESGPGTSTEPSEGSAPGTSESATPESGPGSEPATSGSETPGTSESATPESGPGSEPATSGSETPGTSESATPESGPGTSTEPSEGSAPTAEAAGCGTAEAAGSPAGSPTSTEEGTSESATPESGPGSEPATSGSETPGTSESATPESGPGSPAGSPTSTEEGSPAGSPTSTEEGTSTEPSEGSAPGTSESATPESGPGTSESATPESGPGTSESATPESGPGSEPATSGSETPGSEPATSGSETPGSPAGSPTSTEEGTSTEPSEGSAPGTSTEPSEGSAPGSEPATSGSETPTAEAAGCGTAEAASASR

SEQ ID NO: 366 - protein, 912 aa, synthetic construct
  REGION 1..912: note = Description of Artificial Sequence: Synthetic polypeptide
SAGSPTAEAAGCGTAEAAGSPAGSPTSTEEGTSESATPESGPGTSTEPSEGSAPGSPAGSPTSTEEGTSTEPSEGSAPGTSTEPSEGSAPGTSESATPESGPGSEPATSGSETPGSEPATSGSETPGSPAGSPTSTEEGTSESATPESGPGTSTEPSEGSAPGTSTEPSEGSAPGSPAGSPTSTEEGTSTEPSEGSAPGTSTEPSEGSAPGTSESATPESGPGTSTEPSEGSAPGTSESATPESGPGSEPATSGSETPGTSTEPSEGSAPGTSTEPSEGSAPGTSESATPESGPGTSESATPESGPGSPAGSPTSTEEGTSESATPESGPGSEPATSGSETPGTSESATPESGPGTSTEPSEGSAPGTSTEPSEGSAPGTSTEPSEGSAPGTSTEPSEGSAPGTSTEPSEGSAPGTSTEPSEGSAPGSPAGSPTSTEEGTSTEPSEGSAPTAEAAGCGTAEAAGTSESATPESGPGSEPATSGSETPGTSESATPESGPGSEPATSGSETPGTSESATPESGPGTSTEPSEGSAPGTSESATPESGPGSPAGSPTSTEEGSPAGSPTSTEEGSPAGSPTSTEEGTSESATPESGPGTSTEPSEGSAPGTSESATPESGPGSEPATSGSETPGTSESATPESGPGSEPATSGSETPGTSESATPESGPGTSTEPSEGSAPGSPAGSPTSTEEGTSESATPESGPGSEPATSGSETPGTSESATPESGPGSPAGSPTSTEEGSPAGSPTSTEEGTSTEPSEGSAPGTSESATPESGPGTSESATPESGPGTSESATPESGPGSEPATSGSETPGSEPATSGSETPGSPAGSPTSTEEGTSTEPSEGSAPGTSTEPSEGSAPGSEPATSGSETPGTSESATPESGPGTSTEPSEGSAPTAEAAGCGTAEAASASR

SEQ ID NO: 367 - protein, 864 aa, synthetic construct
  REGION 1..864: note = Description of Artificial Sequence: Synthetic polypeptide
SAGSPGSPAGSPTSTEEGTSESATPESGPGTSTEPSEGSAPGSPAGSPTSTEEGTSTEPSEGSAPGTSTEPSEGSAPGTSESATPESGPGSEPATSGSETPGSEPATSGSETPGSPAGSPTSTEEGTSESATPESGPGTSTEPSEGSAPGTSTEPSEGSAPGSPAGSPTSTEEGTSTEPSEGSAPGTSTEPSEGSAPGTSESATPESGPGTSTEPSEGSAPGTSESATPESGPGSEPATSGSETPGTSTEPSEGSAPGTSTEPSEGSAPGTSESATPESGPGTSESATPESGPGSPAGSPTSTEEGTSESATPESGPGSEPATSGSETPGTSESATPESGPGTSTEPSEGSAPGTSTEPSEGSAPGTSTEPSEGSAPGTSTEPSEGSAPGTSTEPSEGSAPGTSTEPSEGSAPGSPAGSPTSTEEGTSTEPSEGSAPTAEAAGCGTAEAAPGSEPATSGSETPGTSESATPESGPGSEPATSGSETPGTAEAAGCGTAEAASTEPSEGSAPGTSESATPESGPGSPAGSPTSTEEGSPATAEAAGCGTAEAASPTSTEEGTSESATPESGPGTSTEPSEGSAPGTSESATTAEAAGCGTAEAASETPGTSESATPESGPGSEPATSGSETPGTSESATPESGTAEAAGCGTAEAAGSPAGSPTSTEEGTSESATPESGPGSEPATSGSETPGTTAEAAGCGTAEAAAGSPTSTEEGSPAGSPTSTEEGTSTEPSEGSAPGTSESTAEAAGCGTAEAATPESGPGTSESATPESGPGSEPATSGSETPGSEPATSGTAEAAGCGTAEAATEEGTSTEPSEGSAPGTSTEPSEGSAPGSEPATSGSETPTAEAAGCGTAEAASASR

SEQ ID NO: 368 - protein, 432 aa, synthetic construct; identical to SEQ ID NO: 364
  REGION 1..432: note = Description of Artificial Sequence: Synthetic polypeptide

SEQ ID NO: 369 - protein, 432 aa, synthetic construct
  REGION 1..432: note = Description of Artificial Sequence: Synthetic polypeptide
SAGSPTAEAAGCGTAEAAPGSEPATSGSETPGTSESATPESGPGSEPATSGSETPGTAEAAGCGTAEAASTEPSEGSAPGTSESATPESGPGSPAGSPTSTEEGSPATAEAAGCGTAEAASPTSTEEGTSESATPESGPGTSTEPSEGSAPGTSESATTAEAAGCGTAEAASETPGTSESATPESGPGSEPATSGSETPGTSESATPESGTAEAAGCGTAEAAGSPAGSPTSTEEGTSESATPESGPGSEPATSGSETPGTTAEAAGCGTAEAAAGSPTSTEEGSPAGSPTSTEEGTSTEPSEGSAPGTSESTAEAAGCGTAEAATPESGPGTSESATPESGPGSEPATSGSETPGSEPATSGTAEAAGCGTAEAATEEGTSTEPSEGSAPGTSTEPSEGSAPGSEPATSGSETPTAEAAGCGTAEAASASR

SEQ ID NO: 370 - protein, 288 aa, synthetic construct; identical to SEQ ID NO: 181
  REGION 1..288: note = Description of Artificial Sequence: Synthetic polypeptide

SEQ ID NO: 371 - protein, 869 aa, synthetic construct; identical to SEQ ID NO: 179
  REGION 1..869: note = Description of Artificial Sequence: Synthetic polypeptide

SEQ ID NO: 372 - protein, 883 aa, synthetic construct
  REGION 1..883: note = Description of Artificial Sequence: Synthetic polypeptide
GSPGSPAGSPTSTEEGTSESATPESGPGTSTEPSEGSAPGSPAGSPTSTEEGTSTEPSEGSAPGTSTEPSEGSAPGTSESATPESGPGSEPATSGSETPGSEPATSGSETPGSPAGSPTSTEEGTSESATPESGPGTSTEPSEGSAPGTSTEPSEGSAPGSPAGSPTSTEEGTSTEPSEGSAPGTSTEPSEGSAPGTSESATPESGPGTSTEPSEGSAPGTSESATPESGPGSEPATSGSETPGTSTEPSEGSAPGTSTEPSEGSAPGTSESATPESGPGTSESATPESGPGSPAGSPTSTEEGTSESATPESGPGSEPATSGSETPGTSESATPESGPGTSTEPSEGSAPGTSTEPSEGSAPGTSTEPSEGSAPGTSTEPSEGSAPGTSTEPSEGSAPGTSTEPSEGSAPGSPAGSPTSTEEGTSTEPSEGSAPTAEAAGKPGTAEAAGTSESATPESGPGSEPATSGSETPGTSESATPESGPGSEPATSGSETPGTSESATPESGPGTSTEPSEGSAPGTSESATPESGPGSPAGSPTSTEEGSPAGSPTSTEEGSPAGSPTSTEEGTSESATPESGPGTSTEPSEGSAPGTSESATPESGPGSEPATSGSETPGTSESATPESGPGSEPATSGSETPGTSESATPESGPGTSTEPSEGSAPGSPAGSPTSTEEGTSESATPESGPGSEPATSGSETPGTSESATPESGPGSPAGSPTSTEEGSPAGSPTSTEEGTSTEPSEGSAPGTSESATPESGPGTSESATPESGPGTSESATPESGPGSEPATSGSETPGSEPATSGSETPGSPAGSPTSTEEGTSTEPSEGSAPGTSTEPSEGSAPGSEPATSGSETPGTSESATPESGPGTSTEPSEGSAPGK

SEQ ID NO: 373 - protein, 886 aa, synthetic construct
  REGION 1..886: note = Description of Artificial Sequence: Synthetic polypeptide
SAGSPTAEAAGCGTAEAAGSPAGSPTSTEEGTSESATPESGPGTSTEPSEGSAPGSPAGSPTSTEEGTSTEPSEGSAPGTSTEPSEGSAPGTSESATPESGPGSEPATSGSETPGSEPATSGSETPGSPAGSPTSTEEGTSESATPESGPGTSTEPSEGSAPGTSTEPSEGSAPGSPAGSPTSTEEGTSTEPSEGSAPGTSTEPSEGSAPGTSESATPESGPGTSTEPSEGSAPGTSESATPESGPGSEPATSGSETPGTSTEPSEGSAPGTSTEPSEGSAPGTSESATPESGPGTSESATPESGPGSPAGSPTSTEEGTSESATPESGPGSEPATSGSETPGTSESATPESGPGTSTEPSEGSAPGTSTEPSEGSAPGTSTEPSEGSAPGTSTEPSEGSAPGTSTEPSEGSAPGTSTEPSEGSAPGSPAGSPTSTEEGTSTEPSEGSAPGTSESATPESGPGSEPATSGSETPGTSESATPESGPGSEPATSGSETPGTSESATPESGPGTSTEPSEGSAPGTSESATPESGPGSPAGSPTSTEEGSPAGSPTSTEEGSPAGSPTSTEEGTSESATPESGPGTSTEPSEGSAPGTSESATPESGPGSEPATSGSETPGTSESATPESGPGSEPATSGSETPGTSESATPESGPGTSTEPSEGSAPGSPAGSPTSTEEGTSESATPESGPGSEPATSGSETPGTSESATPESGPGSPAGSPTSTEEGSPAGSPTSTEEGTSTEPSEGSAPGTSESATPESGPGTSESATPESGPGTSESATPESGPGSEPATSGSETPGSEPATSGSETPGSPAGSPTSTEEGTSTEPSEGSAPGTSTEPSEGSAPGSEPATSGSETPGTSESATPESGPGTSTEPSEGSAPSASR

SEQ ID NO: 374 - protein, 870 aa, synthetic construct
  REGION 1..870: note = Description of Artificial Sequence: Synthetic polypeptide
CGSPGSPAGSPTSTEEGTSESATPESGPGTSTEPSEGSAPGSPAGSPTSTEEGTSTEPSEGSAPGTSTEPSEGSAPGTSESATPESGPGSEPATSGSETPGSEPATSGSETPGSPAGSPTSTEEGTSESATPESGPGTSTEPSEGSAPGTSTEPSEGSAPGSPAGSPTSTEEGTSTEPSEGSAPGTSTEPSEGSAPGTSESATPESGPGTSTEPSEGSAPGTSESATPESGPGSEPATSGSETPGTSTEPSEGSAPGTSTEPSEGSAPGTSESATPESGPGTSESATPESGPGSPAGSPTSTEEGTSESATPESGPGSEPATSGSETPGTSESATPESGPGTSTEPSEGSAPGTSTEPSEGSAPGTSTEPSEGSAPGTSTEPSEGSAPGTSTEPSEGSAPGTSTEPSEGSAPGSPAGSPTSTEEGTSTEPSEGSAPGTSESATPESGPGSEPATSGSETPGTSESATPESGPGSEPATSGSETPGTSESATPESGPGTSTEPSEGSAPGTSESATPESGPGSPAGSPTSTEEGSPAGSPTSTEEGSPAGSPTSTEEGTSESATPESGPGTSTEPSEGSAPGTSESATPESGPGSEPATSGSETPGTSESATPESGPGSEPATSGSETPGTSESATPESGPGTSTEPSEGSAPGSPAGSPTSTEEGTSESATPESGPGSEPATSGSETPGTSESATPESGPGSPAGSPTSTEEGSPAGSPTSTEEGTSTEPSEGSAPGTSESATPESGPGTSESATPESGPGTSESATPESGPGSEPATSGSETPGSEPATSGSETPGSPAGSPTSTEEGTSTEPSEGSAPGTSTEPSEGSAPGSEPATSGSETPGTSESATPESGPGTSTEPSEGSAPGR

SEQ ID NO: 375 - protein, 342 aa, synthetic construct
  REGION 1..342: note = Description of Artificial Sequence: Synthetic polypeptide
MKNPEQAEEQAEEQREETRPRPRPRPRPRPRPRPRPRPRPSASRSAGSPTGPGSEPATSGSETPGTSESATPESGPGSEPATSGSETPGTSESATPESGPGTSTEPSEGSAPGSPAGSPTSTEEGTSESATPESGPGSEPATSGSETPGTSESATPESGPGSPAGSPTSTEEGSPAGSPTSTEEGTSTEPSEGSAPGTSESATPESGPGTSESATPESGPGTSESATPESGPGSEPATSGSETPGSEPATSGSETPGSPAGSPTSTEEGTSTEPSEGSAPGTSTEPSEGSAPGSEPATSGSETPGTSESATPESGPGTSTEPSEGSAPSASRSAHHHHHHHH

SEQ ID NO: 376 - protein, 486 aa, synthetic construct
  REGION 1..486: note = Description of Artificial Sequence: Synthetic polypeptide
MKNPEQAEEQAEEQREETRPRPRPRPRPRPRPRPRPRPRPSASRSAGSPTAEAAGCGTAEAAPGSEPATSGSETPGTSESATPESGPGSEPATSGSETPGTAEAAGCGTAEAASTEPSEGSAPGTSESATPESGPGSPAGSPTSTEEGSPATAEAAGCGTAEAASPTSTEEGTSESATPESGPGTSTEPSEGSAPGTSESATTAEAAGCGTAEAASETPGTSESATPESGPGSEPATSGSETPGTSESATPESGTAEAAGCGTAEAAGSPAGSPTSTEEGTSESATPESGPGSEPATSGSETPGTTAEAAGCGTAEAAAGSPTSTEEGSPAGSPTSTEEGTSTEPSEGSAPGTSESTAEAAGCGTAEAATPESGPGTSESATPESGPGSEPATSGSETPGSEPATSGTAEAAGCGTAEAATEEGTSTEPSEGSAPGTSTEPSEGSAPGSEPATSGSETPTAEAAGCGTAEAASASRSAHHHHHHHH

SEQ ID NO: 377 - protein, 918 aa, synthetic construct
  REGION 1..918: note = Description of Artificial Sequence: Synthetic polypeptide
MKNPEQAEEQAEEQREETRPRPRPRPRPRPRPRPRPRPRPSASRSAGSPGSPAGSPTSTEEGTSESATPESGPGTSTEPSEGSAPGSPAGSPTSTEEGTSTEPSEGSAPGTSTEPSEGSAPGTSESATPESGPGSEPATSGSETPGSEPATSGSETPGSPAGSPTSTEEGTSESATPESGPGTSTEPSEGSAPGTSTEPSEGSAPGSPAGSPTSTEEGTSTEPSEGSAPGTSTEPSEGSAPGTSESATPESGPGTSTEPSEGSAPGTSESATPESGPGSEPATSGSETPGTSTEPSEGSAPGTSTEPSEGSAPGTSESATPESGPGTSESATPESGPGSPAGSPTSTEEGTSESATPESGPGSEPATSGSETPGTSESATPESGPGTSTEPSEGSAPGTSTEPSEGSAPGTSTEPSEGSAPGTSTEPSEGSAPGTSTEPSEGSAPGTSTEPSEGSAPGSPAGSPTSTEEGTSTEPSEGSAPTAEAAGCGTAEAAPGSEPATSGSETPGTSESATPESGPGSEPATSGSETPGTAEAAGCGTAEAASTEPSEGSAPGTSESATPESGPGSPAGSPTSTEEGSPATAEAAGCGTAEAASPTSTEEGTSESATPESGPGTSTEPSEGSAPGTSESATTAEAAGCGTAEAASETPGTSESATPESGPGSEPATSGSETPGTSESATPESGTAEAAGCGTAEAAGSPAGSPTSTEEGTSESATPESGPGSEPATSGSETPGTTAEAAGCGTAEAAAGSPTSTEEGSPAGSPTSTEEGTSTEPSEGSAPGTSESTAEAAGCGTAEAATPESGPGTSESATPESGPGSEPATSGSETPGSEPATSGTAEAAGCGTAEAATEEGTSTEPSEGSAPGTSTEPSEGSAPGSEPATSGSETPTAEAAGCGTAEAASASRSAHHHHHHHH

SEQ ID NO: 378 - protein, 883 aa, synthetic construct; identical to SEQ ID NO: 372
  REGION 1..883: note = Description of Artificial Sequence: Synthetic polypeptide

SEQ ID NO: 379 - protein, 886 aa, synthetic construct; identical to SEQ ID NO: 373
  REGION 1..886: note = Description of Artificial Sequence: Synthetic polypeptide

SEQ ID NO: 380 - protein, 144 aa, synthetic construct
  REGION 1..144: note = Description of Artificial Sequence: Synthetic polypeptide
SAGSPTEGTSTEPSEGSAPGTSESTAEAAGCGTAEAATPESGPGTSESATPESGPGSEPATSGSETPGSEPATSGTAEAAGCGTAEAATEEGTSTEPSEGSAPGTSTEPSEGSAPGSEPATSGSETPTAEAAGCGTAEAASASR

SEQ ID NO: 381 - protein, 432 aa, synthetic construct
  REGION 1..432: note = Description of Artificial Sequence: Synthetic polypeptide
SAGSPTPGTSESATPESGPGSEPATSGSETPGTSESATPESGPGSEPATSGSETPGTSESATPESGPGTSTEPSEGSAPGTSESATPESGPGSPAGSPTSTEEGSPAGSPTSTEEGSPAGSPTSTEEGTSESATPESGPGTSTEPSEGSAPGTSESATPESGPGSEPATSGSETPGTSESATPESGPGSEPATSGSETPGTSESATPESGPGTSTEPSEGSAPGSPAGSPTSTEEGTSESATPESGPGSEPATSGSETPGTSESATPESGPGSPAGSPTSTEEGSPAGSPTSTEEGTSTEPSEGSAPGTSESATPESGPGTSESATPESGPGTSESATPESGPGSEPATSGSETPGSEPATSGSETPGSPAGSPTSTEEGTSTEPSEGSAPGTSTEPSEGSAPGSEPATSGSETPTAEAAGCGTAEAASASR

SEQ ID NO: 382 - protein, 432 aa, synthetic construct
  REGION 1..432: note = Description of Artificial Sequence: Synthetic polypeptide
SAGSPTGSEPATSGSETPGTSESATPESGPGSEPATSGSETPGTSESATPESGPGTSTEPSEGSAPGTSESATPESGPGSPAGSPTSTEEGSPAGSPTSTEEGSPAGSPTSTEEGTSESATPESGPGTSTEPSEGSAPGTSESATPESGPGSEPATSGSETPGTSESATPESGPGSEPATSGSETPGTSESATPESGPGTSTEPSEGSAPTAEAAGCGTAEAAGSPAGSPTSTEEGTSESATPESGPGSEPATSGSETPGTSESATPESGPGSPAGSPTSTEEGSPAGSPTSTEEGTSTEPSEGSAPGTSESTAEAAGCGTAEAATPESGPGTSESATPESGPGSEPATSGSETPGSEPATSGSETPGSPAGSPTSTEEGTSTEPSEGSAPGTSTEPSEGSAPGSEPATSGSETPTAEAAGCGTAEAASASR

SEQ ID NO: 383 - protein, 432 aa, synthetic construct
  REGION 1..432: note = Description of Artificial Sequence: Synthetic polypeptide
SAGSPTPGTSESATPESGPGSEPATSGSETPGTSESATPESGPGSEPATSGSETPGTSESATPESGPGTSTEPSEGSAPGTSESATPESGPGSPAGSPTSTEEGSPAGSPTSTEEGSPAGSPTSTEEGTSESATPESGPGTSTEPSEGSAPGTSESATPESGPGSEPATSGSETPGTSESATPESGPGSEPATSGSETPGTSESATPESGPGTSTEPSEGSAPGSPAGSPTSTEEGTSESATPESGPGSEPATSGSETPGTSESATPESGPGSPAGSPTSTEEGSPAGSPTSTEEGTSTEPSEGSAPGTSESTAEAAGCGTAEAATPESGPGTSESATPESGPGSEPATSGSETPGSEPATSGTAEAAGCGTAEAATEEGTSTEPSEGSAPGTSTEPSEGSAPGSEPATSGSETPTAEAAGCGTAEAASASR

SEQ ID NO: 384 - protein, 144 aa, synthetic construct
  REGION 1..144: note = Description of Artificial Sequence: Synthetic polypeptide
SAGSPGSTSSTAESPGPGSTSSTAESPGPGCTSESPSGTAPGSTSSTAESPGPGSTSSTAESPGPGTSTPESGSASPGSTSCSPSGEAPGTSPSGESSTAPGSTSESPSGTAPGSTSESPSGTAPETSPSGESCTAPGSTSASR

SEQ ID NO: 385 - protein, 144 aa, synthetic construct
  REGION 1..144: note = Description of Artificial Sequence: Synthetic polypeptide
SAGSPGTPGSGTASSSPGSSTPSGATGSPGCAGSGTASSSPGSSTPSGATGSPGTPGSGTASSSPGSSTPSGATGSPGSSTCSGATGSPGSSPSASTGTGPGSSPSASTGTGPGASPGTSSTGSPGTPGSGTACSSPGSSSASR

SEQ ID NO: 386 - protein, 864 aa, synthetic construct
  REGION 1..864: note = Description of Artificial Sequence: Synthetic polypeptide
SAGSPGSPAGSPTSTEEGTSESATPESGPGTSTEPSEGSAPGSPAGSPTSTEEGTSTEPSEGSAPGTSTEPSEGSAPGTSESATPESGPGSEPATSGSETPGSEPATSGSETPGSPAGSPTSTEEGTSESATPESGPGTSTEPSEGSAPGTSTEPSEGSAPGSPAGSPTSTEEGTSTEPSEGSAPGTSTEPSEGSAPGTSESATPESGPGTSTEPSEGSAPGTSESATPESGPGSEPATSGSETPGTSTEPSEGSAPGTSTEPSEGSAPGTSESATPESGPGTSESATPESGPGSPAGSPTSTEEGTSESATPESGPGSEPATSGSETPGTSESATPESGPGTSTEPSEGSAPGTSTEPSEGSAPGTSTEPSEGSAPGTSTEPSEGSAPGTSTEPSEGSAPGTSTEPSEGSAPGSPAGSPTSTEEGTSTEPSEGSAPGTSESATPESGPGSEPATSGSETPGTSESATPESGPGSEPATSGSETPGTSESATPESGPGTSTEPSEGSAPGTSESATPESGPGSPAGSPTSTEEGSPAGSPTSTEEGSPAGSPTSTEEGTSESATPESGPGTSTEPSEGSAPGTSESATPESGPGSEPATSGSETPGTSESATPESGPGSEPATSGSETPGTSESATPESGPGTSTEPSEGSAPGSPAGSPTSTEEGTSESATPESGPGSEPATSGSETPGTSESATPESGPGSPAGSPTSTEEGSPAGSPTSTEEGTSTEPSEGSAPGTSESATPESGPGTSESATPESGPGTSESATPESGPGSEPATSGSETPGSEPATSGSETPGSPAGSPTSTEEGTSTEPSEGSAPGTSTEPSEGSAPGSEPATSGSETPGTSESATPESGPGTESASK

SEQ ID NO: 387 - protein, 288 aa, synthetic construct
  REGION 1..288: note = Description of Artificial Sequence: Synthetic polypeptide
SAGSPTGPGSEPATSGSETPGTSESATPESGPGSEPATSGSETPGTSESATPESGPGTSTEPSEGSAPGSPAGSPTSTEEGTSESATPESGPGSEPATSGSETPGTSESATPESGPGSPAGSPTSTEEGSPAGSPTSTEEGTSTEPSEGSAPGTSESATPESGPGTSESATPESGPGTSESATPESGPGSEPATSGSETPGSEPATSGSETPGSPAGSPTSTEEGTSTEPSEGSAPGTSTEPSEGSAPGSEPATSGSETPGTSESATPESGPGTSTACSEGSAPSASR

SEQ ID NO: 388 - protein, 288 aa, synthetic construct
  REGION 1..288: note = Description of Artificial Sequence: Synthetic polypeptide
SAGSPTGPGSEPATSGSETPGTSESATPESGPGSEPATSGSETPGTSESATPESGPGTSTEPSEGSAPGSPAGSPTSTEEGTSESATPESGPGSEPATSGSETPGTSESATPESGPGSPAGSPTSTEEGSPAGSPTSTEEGTSTEPSEGSAPGTSESATPESGPGTSESATPESGPGTSESATPESGPGSEPATSGSETPGSEPATSGSETPGSPAGSPTSTEEGTSTEPSEGSAPGTSTEPSEGSAPGSEPATSGSETPGTSESATPESGPGTSTEPSEGSCASASR

SEQ ID NO: 389 - protein, 144 aa, synthetic construct
  REGION 1..144: note = Description of Artificial Sequence: Synthetic polypeptide
SAGSPGSCAGSPTSTEEGTSESACPESGPGTSTEPSEGSCPGSPAGSPTSTEEGTCTEPSEGSAPGTSTEPCSGSAPGTSESATPESCPGSEPATSGSETPGSCPATSGSETPGSPAGSCTSTEEGTSESATPESCPGTESASR

SEQ ID NO: 390 - protein, 288 aa, synthetic construct
  REGION 1..288: note = Description of Artificial Sequence: Synthetic polypeptide
SAGSPTGCGSEPATSGSETPGTSESATPESGPGSEPATSGSETPGTSESATPESGPGTSTEPSEGSAPGSPAGSPTSTEEGTSESATPESGPGSEPATSGSETPGTSESATPESGPGSPAGSPTSTEEGSPAGSPTSTEEGTSCTPSEGSAPGTSESATPESGPGTSESATPESGPGTSESATPESGPGSEPATSGSETPGSEPATSGSETPGSPAGSPTSTEEGTSTEPSEGSAPGTSTEPSEGSAPGSEPATSGSETPGTSESATPESGPGTSTEPSCGSAPSASR

SEQ ID NO: 391 - protein, 288 aa, synthetic construct
  REGION 1..288: note = Description of Artificial Sequence: Synthetic polypeptide
SAGSPTGCGSEPATSGSETPGTSESATPESGPGSEPATSGSCTPGTSESATPESGPGTSTEPSEGSAPGSPAGSPCSTEEGTSESATPESGPGSEPATSGSETPGTSESCTPESGPGSPAGSPTSTEEGSPAGSPTSTEEGTSCTPSEGSAPGTSESATPESGPGTSESATPESGPGCSESATPESGPGSEPATSGSETPGSEPATSGSETCGSPAGSPTSTEEGTSTEPSEGSAPGTSTEPSEGCAPGSEPATSGSETPGTSESATPESGPGTSTEPSCGSAPSASR

SEQ ID NO: 392 - protein, 12 aa, synthetic construct
  REGION 1..12: note = Description of Artificial Sequence: Synthetic peptide
GGSPAGSKPTSP

SEQ ID NO: 393 - protein, 12 aa, synthetic construct
  REGION 1..12: note = Description of Artificial Sequence: Synthetic peptide
GASASKPAPSTG

SEQ ID NO: 394 - protein, 5 aa, synthetic construct
  REGION 1..5: note = Description of Artificial Sequence: Synthetic peptide
PPKPP

SEQ ID NO: 395 - protein, 5 aa, synthetic construct
  REGION 1..5: note = Description of Artificial Sequence: Synthetic peptide
GGKPG

SEQ ID NO: 396 - protein, 8 aa, synthetic construct
  REGION 1..8: note = Description of Artificial Sequence: Synthetic peptide
EGGKPGES

SEQ ID NO: 397 - protein, 14 aa, synthetic construct
  REGION 1..14: note = Description of Artificial Sequence: Synthetic peptide
EGGSPAGSKPTSPE

SEQ ID NO: 398 - protein, 14 aa, synthetic construct
  REGION 1..14: note = Description of Artificial Sequence: Synthetic peptide
EGASASKPAPSTGE

SEQ ID NO: 399 - protein, 11 aa, synthetic construct
  REGION 1..11: note = Description of Artificial Sequence: Synthetic peptide
GGSPAGSCTSP

SEQ ID NO: 400 - protein, 11 aa, synthetic construct
  REGION 1..11: note = Description of Artificial Sequence: Synthetic peptide
GASASCAPSTG

SEQ ID NO: 401 - protein, 11 aa, synthetic construct
  REGION 1..11: note = Description of Artificial Sequence: Synthetic peptide
GPEPTCPAPSG

SEQ ID NO: 402 - protein, 13 aa, synthetic construct
  REGION 1..13: note = Description of Artificial Sequence: Synthetic peptide
TAEAAGCGTAEAA

SEQ ID NO: 403 - protein, 5 aa, synthetic construct
  REGION 1..5: note = Description of Artificial Sequence: Synthetic peptide
GECEP

SEQ ID NO: 404 - protein, 6 aa, synthetic construct
  REGION 1..6: note = Description of Artificial Sequence: Synthetic peptide
GRPCRP

SEQ ID NO: 405 - protein, 15 aa, synthetic construct
  REGION 1..15: note = Description of Artificial Sequence: Synthetic peptide
GETSPAGSCTSPTET

SEQ ID NO: 406 - protein, 12 aa, synthetic construct
  REGION 1..12: note = Description of Artificial Sequence: Synthetic peptide
TESGRPCRPSET

SEQ ID NO: 407 - protein, 12 aa, synthetic construct
  REGION 1..12: note = Description of Artificial Sequence: Synthetic peptide
GPEPTCPAPSEG

SEQ ID NO: 408 - protein, 864 aa, synthetic construct
  REGION 1..864: note = Description of Artificial Sequence: Synthetic polypeptide
SAGSPGSPAGSPTSTEEGTSESATPESGPGTSTEPSEGSAPGSPAGSPTSTEEGTSTEPSEGSAPGTSTEPSEGSAPGTSESATPESGPGSEPATSGSETPGSEPATSGSETPGSPAGSPTSTEEGTSESATPESGPGTSTEPSEGSAPGTSTEPSEGSAPGSPAGSPTSTEEGTSTEPSEGSAPGTSTEPSEGSAPGTSESATPESGPGTSTEPSEGSAPGTSESATPESGPGSEPATSGSETPGTSTEPSEGSAPGTSTEPSEGSAPGTSESATPESGPGTSESATPESGPGSPAGSPTSTEEGTSESATPESGPGSEPATSGSETPGTSESATPESGPGTSTEPSEGSAPGTSTEPSEGSAPGTSTEPSEGSAPGTSTEPSEGSAPGTSTEPSEGSAPGTSTEPSEGSAPGSPAGSPTSTEEGTESASRSAGSPGSPAGSPTSTEEGTSESATPESGPGTSTEPSEGSAPGSPAGSPTSTEEGTSTEPSEGSAPGTSTEPSEGSAPGTSESATPESGPGSEPATSGSETPGSEPATSGSETPGSPAGSPTSTEEGTSESATPESGPGTSTEPSEGSAPGTSTEPSEGSAPGSPAGSPTSTEEGTSTEPSEGSAPGTSTEPSEGSAPGTSESATPESGPGTSTEPSEGSAPGTSESATPESGPGSEPATSGSETPGTSTEPSEGSAPGTSTEPSEGSAPGTSESATPESGPGTSESATPESGPGSPAGSPTSTEEGTSESATPESGPGSEPATSGSETPGTSESATPESGPGTSTEPSEGSAPGTSTEPSEGSAPGTSTEPSEGSAPGTSTEPSEGSAPGTSTEPSEGSAPGTSTEPSEGSAPGSPAGSPTSTEEGTESASR

SEQ ID NO: 409 - protein, 864 aa, synthetic construct
  REGION 1..864: note = Description of Artificial Sequence: Synthetic polypeptide
SAGSPTGPGSEPATSGSETPGTSESATPESGPGSEPATSGSETPGTSESATPESGPGTSTEPSEGSAPGSPAGSPTSTEEGTSESATPESGPGSEPATSGSETPGTSESATPESGPGSPAGSPTSTEEGSPAGSPTSTEEGTSTEPSEGSAPGTSESATPESGPGTSESATPESGPGTSESATPESGPGSEPATSGSETPGSEPATSGSETPGSPAGSPTSTEEGTSTEPSEGSAPGTSTEPSEGSAPGSEPATSGSETPGTSESATPESGPGTSTEPSEGSAPSASRSAGSPTGPGSEPATSGSETPGTSESATPESGPGSEPATSGSETPGTSESATPESGPGTSTEPSEGSAPGSPAGSPTSTEEGTSESATPESGPGSEPATSGSETPGTSESATPESGPGSPAGSPTSTEEGSPAGSPTSTEEGTSTEPSEGSAPGTSESATPESGPGTSESATPESGPGTSESATPESGPGSEPATSGSETPGSEPATSGSETPGSPAGSPTSTEEGTSTEPSEGSAPGTSTEPSEGSAPGSEPATSGSETPGTSESATPESGPGTSTEPSEGSAPSASRSAGSPTGPGSEPATSGSETPGTSESATPESGPGSEPATSGSETPGTSESATPESGPGTSTEPSEGSAPGSPAGSPTSTEEGTSESATPESGPGSEPATSGSETPGTSESATPESGPGSPAGSPTSTEEGSPAGSPTSTEEGTSTEPSEGSAPGTSESATPESGPGTSESATPESGPGTSESATPESGPGSEPATSGSETPGSEPATSGSETPGSPAGSPTSTEEGTSTEPSEGSAPGTSTEPSEGSAPGSEPATSGSETPGTSESATPESGPGTSTEPSEGSAPSASR

SEQ ID NO: 410 - protein, 864 aa, synthetic construct
  REGION 1..864: note = Description of Artificial Sequence: Synthetic polypeptide
SAGSPGSPAGSPTSTEEGTSESATPESGPGTSTEPSEGSAPGSPAGSPTSTEEGTSTEPSEGSAPGTSTEPSEGSAPGTSESATPESGPGSEPATSGSETPGSEPATSGSETPGSPAGSPTSTEEGTSESATPESGPGTESASRSAGSPGSPAGSPTSTEEGTSESATPESGPGTSTEPSEGSAPGSPAGSPTSTEEGTSTEPSEGSAPGTSTEPSEGSAPGTSESATPESGPGSEPATSGSETPGSEPATSGSETPGSPAGSPTSTEEGTSESATPESGPGTESASRSAGSPGSPAGSPTSTEEGTSESATPESGPGTSTEPSEGSAPGSPAGSPTSTEEGTSTEPSEGSAPGTSTEPSEGSAPGTSESATPESGPGSEPATSGSETPGSEPATSGSETPGSPAGSPTSTEEGTSESATPESGPGTESASRSAGSPGSPAGSPTSTEEGTSESATPESGPGTSTEPSEGSAPGSPAGSPTSTEEGTSTEPSEGSAPGTSTEPSEGSAPGTSESATPESGPGSEPATSGSETPGSEPATSGSETPGSPAGSPTSTEEGTSESATPESGPGTESASRSAGSPGSPAGSPTSTEEGTSESATPESGPGTSTEPSEGSAPGSPAGSPTSTEEGTSTEPSEGSAPGTSTEPSEGSAPGTSESATPESGPGSEPATSGSETPGSEPATSGSETPGSPAGSPTSTEEGTSESATPESGPGTESASRSAGSPGSPAGSPTSTEEGTSESATPESGPGTSTEPSEGSAPGSPAGSPTSTEEGTSTEPSEGSAPGTSTEPSEGSAPGTSESATPESGPGSEPATSGSETPGSEPATSGSETPGSPAGSPTSTEEGTSESATPESGPGTESASR

SEQ ID NO: 411 - protein, 864 aa, synthetic construct
  REGION 1..864: note = Description of Artificial Sequence: Synthetic polypeptide
SAGSPTGPGSEPATSGSETPGTSESATPESGPGSEPATSGSETPGTSESATPESGPGTSTEPSEGSAPGSPAGSPTSTEEGTSESATPESGPGSEPATSGSETPGTSESATPESGPGSPAGSPTSTEEGSPAGSPTSTEEGTSTEPSEGSAPGTSESATPESGPGTSESATPESGPGTSESATPESGPGSEPATSGSETPGSEPATSGSETPGSPAGSPTSTEEGTSTEPSEGSAPGTSTEPSEGSAPGSEPATSGSETPGTSESATPESGPGTSTACSEGSAPSASRSAGSPTGPGSEPATSGSETPGTSESATPESGPGSEPATSGSETPGTSESATPESGPGTSTEPSEGSAPGSPAGSPTSTEEGTSESATPESGPGSEPATSGSETPGTSESATPESGPGSPAGSPTSTEEGSPAGSPTSTEEGTSTEPSEGSAPGTSESATPESGPGTSESATPESGPGTSESATPESGPGSEPATSGSETPGSEPATSGSETPGSPAGSPTSTEEGTSTEPSEGSAPGTSTEPSEGSAPGSEPATSGSETPGTSESATPESGPGTSTACSEGSAPSASRSAGSPTGPGSEPATSGSETPGTSESATPESGPGSEPATSGSETPGTSESATPESGPGTSTEPSEGSAPGSPAGSPTSTEEGTSESATPESGPGSEPATSGSETPGTSESATPESGPGSPAGSPTSTEEGSPAGSPTSTEEGTSTEPSEGSAPGTSESATPESGPGTSESATPESGPGTSESATPESGPGSEPATSGSETPGSEPATSGSETPGSPAGSPTSTEEGTSTEPSEGSAPGTSTEPSEGSAPGSEPATSGSETPGTSESATPESGPGTSTACSEGSAPSASR

SEQ ID NO: 412 - protein, 864 aa, synthetic construct
  REGION 1..864: note = Description of Artificial Sequence: Synthetic polypeptide
SAGSPTGPGSEPATSGSETPGTSESATPESGPGSEPATSGSETPGTSESATPESGPGTSTEPSEGSAPGSPAGSPTSTEEGTSESATPESGPGSEPATSGSETPGTSESATPESGPGSPAGSPTSTEEGSPAGSPTSTEEGTSTEPSEGSAPGTSESATPESGPGTSESATPESGPGTSESATPESGPGSEPATSGSETPGSEPATSGSETPGSPAGSPTSTEEGTSTEPSEGSAPGTSTEPSEGSAPGSEPATSGSETPGTSESATPESGPGTSTEPSEGSCASASRSAGSPTGPGSEPATSGSETPGTSESATPESGPGSEPATSGSETPGTSESATPESGPGTSTEPSEGSAPGSPAGSPTSTEEGTSESATPESGPGSEPATSGSETPGTSESATPESGPGSPAGSPTSTEEGSPAGSPTSTEEGTSTEPSEGSAPGTSESATPESGPGTSESATPESGPGTSESATPESGPGSEPATSGSETPGSEPATSGSETPGSPAGSPTSTEEGTSTEPSEGSAPGTSTEPSEGSAPGSEPATSGSETPGTSESATPESGPGTSTEPSEGSCASASRSAGSPTGPGSEPATSGSETPGTSESATPESGPGSEPATSGSETPGTSESATPESGPGTSTEPSEGSAPGSPAGSPTSTEEGTSESATPESGPGSEPATSGSETPGTSESATPESGPGSPAGSPTSTEEGSPAGSPTSTEEGTSTEPSEGSAPGTSESATPESGPGTSESATPESGPGTSESATPESGPGSEPATSGSETPGSEPATSGSETPGSPAGSPTSTEEGTSTEPSEGSAPGTSTEPSEGSAPGSEPATSGSETPGTSESATPESGPGTSTEPSEGSCASASR

SEQ ID NO: 413 - protein, 7 aa, synthetic construct
  REGION 1..7: note = Description of Artificial Sequence: Synthetic peptide
LYPYPYP

SEQ ID NO: 414 - protein, 6 aa, synthetic construct
  REGION 1..6: note = Description of Artificial Sequence: Synthetic peptide
LYYYPP

SEQ ID NO: 415 - protein, 4 aa, synthetic construct
  REGION 1..4: note = Description of Artificial Sequence: Synthetic peptide
WPWP

SEQ ID NO: 416 - protein, 6 aa, synthetic construct
  REGION 1..6: note = Description of Artificial Sequence: Synthetic peptide
FPFPFP

SEQ ID NO: 417 - protein, 20 aa, synthetic construct
  REGION 1..20: note = Description of Artificial Sequence: Synthetic peptide
  REGION 1..20: note = misc_feature - This sequence may encompass 3-20 residues
YYYYYYYYYYYYYYYYYYYY

SEQ ID NO: 418 - protein, 20 aa, synthetic construct
  REGION 1..20: note = Description of Artificial Sequence: Synthetic peptide
  REGION 1..20: note = misc_feature - This sequence may encompass 3-20 residues
WWWWWWWWWWWWWWWWWWWW

SEQ ID NO: 419 - protein, 40 aa, synthetic construct
  REGION 1..40: note = Description of Artificial Sequence: Synthetic polypeptide
  REGION 1..40: note = misc_feature - This sequence may encompass 3-20 "Tyr Pro" repeating units
YPYPYPYPYPYPYPYPYPYPYPYPYPYPYPYPYPYPYPYP

SEQ ID NO: 420 - protein, 40 aa, synthetic construct
  REGION 1..40: note = Description of Artificial Sequence: Synthetic polypeptide
  REGION 1..40: note = misc_feature - This sequence may encompass 3-20 repeating "Trp Pro" repeating units
WPWPWPWPWPWPWPWPWPWPWPWPWPWPWPWPWPWPWPWP

SEQ ID NO: 421 - protein, 40 aa, synthetic construct
  REGION 1..40: note = Description of Artificial Sequence: Synthetic polypeptide
  REGION 1..40: note = misc_feature - This sequence may encompass 3-20 repeating "Phe Pro" repeating units
FPFPFPFPFPFPFPFPFPFPFPFPFPFPFPFPFPFPFPFP

SEQ ID NO: 422 - protein, 40 aa, synthetic construct
  REGION 1..40: note = Description of Artificial Sequence: Synthetic polypeptide
  REGION 1..40: note = misc_feature - This sequence may encompass 3-20 repeating "Leu Pro" repeating units
LPLPLPLPLPLPLPLPLPLPLPLPLPLPLPLPLPLPLPLP

SEQ ID NO: 423 - protein, 40 aa, synthetic construct
  REGION 1..40: note = Description of Artificial Sequence: Synthetic polypeptide
  REGION 1..40: note = misc_feature - This sequence may encompass 3-20 repeating "Arg Pro" repeating units
RPRPRPRPRPRPRPRPRPRPRPRPRPRPRPRPRPRPRPRP

SEQ ID NO: 424 - protein, 40 aa, synthetic construct
  REGION 1..40: note = Description of Artificial Sequence: Synthetic polypeptide
  REGION 1..40: note = misc_feature - This sequence may encompass 3-20 repeating "Lys Pro" repeating units
KPKPKPKPKPKPKPKPKPKPKPKPKPKPKPKPKPKPKPKP

SEQ ID NO: 425 - protein, 40 aa, synthetic construct
  REGION 1..40: note = Description of Artificial Sequence: Synthetic polypeptide
  REGION 1..40: note = misc_feature - This sequence may encompass 3-20 repeating "His Pro" repeating units
HPHPHPHPHPHPHPHPHPHPHPHPHPHPHPHPHPHPHPHP

SEQ ID NO: 426 - protein, 20 aa, synthetic construct
  REGION 1..20: note = Description of Artificial Sequence: Synthetic peptide
  REGION 1..20: note = misc_feature - This sequence may encompass 3-20 residues
HHHHHHHHHHHHHHHHHHHH

SEQ ID NO: 427 - protein, 20 aa, synthetic construct
  REGION 1..20: note = Description of Artificial Sequence: Synthetic peptide
  REGION 1..20: note = misc_feature - This sequence may encompass 3-20 residues
RRRRRRRRRRRRRRRRRRRR

SEQ ID NO: 428 - protein, 20 aa, synthetic construct
  REGION 1..20: note = Description of Artificial Sequence: Synthetic peptide
  REGION 1..20: note = misc_feature - This sequence may encompass 3-20 residues
EEEEEEEEEEEEEEEEEEEE

SEQ ID NO: 429 - protein, 20 aa, synthetic construct
  REGION 1..20: note = Description of Artificial Sequence: Synthetic peptide
  REGION 1..20: note = misc_feature - This sequence may encompass 3-20 residues
DDDDDDDDDDDDDDDDDDDD

SEQ ID NO: 430 - protein, 40 aa, synthetic construct
  REGION 1..40: note = Description of Artificial Sequence: Synthetic polypeptide
  REGION 1..40: note = misc_feature - This sequence may encompass 3-20 "Glu Asp" repeating units
EDEDEDEDEDEDEDEDEDEDEDEDEDEDEDEDEDEDEDED

SEQ ID NO: 431 - protein, 40 aa, synthetic construct
  REGION 1..40: note = Description of Artificial Sequence: Synthetic polypeptide
  REGION 1..40: note = misc_feature - This sequence may encompass 3-20 "Glu Pro" repeating units
EPEPEPEPEPEPEPEPEPEPEPEPEPEPEPEPEPEPEPEP

SEQ ID NO: 432 - protein, 40 aa, synthetic construct
  REGION 1..40: note = Description of Artificial Sequence: Synthetic polypeptide
  REGION 1..40: note = misc_feature - This sequence may encompass 3-20 "Asp Pro" repeating units
DPDPDPDPDPDPDPDPDPDPDPDPDPDPDPDPDPDPDPDP

SEQ ID NO: 433 - protein, 10 aa, synthetic construct
  REGION 1..10: note = Description of Artificial Sequence: Synthetic peptide
RPRPRPRPRP

SEQ ID NO: 434 - protein, 12 aa, synthetic construct
  REGION 1..12: note = Description of Artificial Sequence: Synthetic peptide
RPRPRPRPRPGR

SEQ ID NO: 435 - protein, 14 aa, synthetic construct
  REGION 1..14: note = Description of Artificial Sequence: Synthetic peptide
RPRPRPRPRPRPRP

SEQ ID NO: 436 - protein, 16 aa, synthetic construct
  REGION 1..16: note = Description of Artificial Sequence: Synthetic peptide
RPRPRPRPRPRPRPGR

SEQ ID NO: 437 - protein, 10 aa, synthetic construct
  REGION 1..10: note = Description of Artificial Sequence: Synthetic peptide
KPKPKPKPKP

SEQ ID NO: 438 - protein, 12 aa, synthetic construct
  REGION 1..12: note = Description of Artificial Sequence: Synthetic peptide
KPKPKPKPKPGR

SEQ ID NO: 439 - protein, 18 aa, synthetic construct
  REGION 1..18: note = Description of Artificial Sequence: Synthetic peptide
RPRPRPRPRPRPRPRPRP

SEQ ID NO: 440 - protein, 20 aa, synthetic construct
  REGION 1..20: note = Description of Artificial Sequence: Synthetic peptide
RPRPRPRPRPRPRPRPRPGR

SEQ ID NO: 441 - protein, 22 aa, synthetic construct
  REGION 1..22: note = Description of Artificial Sequence: Synthetic peptide
RPRPRPRPRPRPRPRPRPRPRP

SEQ ID NO: 442 - protein, 24 aa, synthetic construct
  REGION 1..24: note = Description of Artificial Sequence: Synthetic peptide
RPRPRPRPRPRPRPRPRPRPRPGR

SEQ ID NO: 443 - protein, 28 aa, synthetic construct
  REGION 1..28: note = Description of Artificial Sequence: Synthetic peptide
RPRPRPRPRPRPRPRPRPRPRPRPRPRP

SEQ ID NO: 444 - protein, 18 aa, synthetic construct
  REGION 1..18: note = Description of Artificial Sequence: Synthetic peptide
RPRPKPRPKPRPKPRPKP

SEQ ID NO: 445 - protein, 19 aa, synthetic construct
  REGION 1..19: note = Description of Artificial Sequence: Synthetic peptide
PRPKPRPKPRPKPRPKPGR

SEQ ID NO: 446 - protein, 22 aa, synthetic construct
  REGION 1..22: note = Description of Artificial Sequence: Synthetic peptide
RPRPKPRPKPRPKPRPKPRPKP

SEQ ID NO: 447 - protein, 24 aa, synthetic construct
  REGION 1..24: note = Description of Artificial Sequence: Synthetic peptide
RPRPKPRPKPRPKPRPKPRPKPGR

SEQ ID NO: 448 - protein, 11 aa, synthetic construct
  REGION 1..11: note = Description of Artificial Sequence: Synthetic peptide
GSPYGYPYSYS

SEQ ID NO: 449 - protein, 11 aa, synthetic construct
  REGION 1..11: note = Description of Artificial Sequence: Synthetic peptide
GSPWGSPTSTE

SEQ ID NO: 450 - protein, 11 aa, synthetic construct
  REGION 1..11: note = Description of Artificial Sequence: Synthetic peptide
GSPAGSPTSTE

SEQ ID NO: 451 - protein, 11 aa, synthetic construct
  REGION 1..11: note = Description of Artificial Sequence: Synthetic peptide
  MOD_RES 4: note = Ile, Leu, Val, Phe, Trp or Tyr
  MOD_RES 6: note = Ile, Leu, Val, Phe, Trp or Tyr
  MOD_RES 8: note = Ile, Leu, Val, Phe, Trp or Tyr
  MOD_RES 10: note = Ile, Leu, Val, Phe, Trp or Tyr
GSPXGXPXSXS

SEQ ID NO: 452 - protein, 11 aa, synthetic construct
  REGION 1..11: note = Description of Artificial Sequence: Synthetic peptide
  MOD_RES 6: note = Ile, Leu, Val, Phe, Trp or Tyr
  MOD_RES 8: note = Ile, Leu, Val, Phe, Trp or Tyr
  MOD_RES 10: note = Ile, Leu, Val, Phe, Trp or Tyr
GSPSGXPXSXS

SEQ ID NO: 453 - protein, 11 aa, synthetic construct
  REGION 1..11: note = Description of Artificial Sequence: Synthetic peptide
  MOD_RES 8: note = Ile, Leu, Val, Phe, Trp or Tyr
  MOD_RES 10: note = Ile, Leu, Val, Phe, Trp or Tyr
GSPSGTPXSXS

SEQ ID NO: 454 - protein, 11 aa, synthetic construct
  REGION 1..11: note = Description of Artificial Sequence: Synthetic peptide
  MOD_RES 4: note = Arg, Lys or His
  MOD_RES 6: note = Arg, Lys or His
  MOD_RES 8: note = Arg, Lys or His
  MOD_RES 10: note = Arg, Lys or His
GSPXGXPXSXS

SEQ ID NO: 455 - protein, 11 aa, synthetic construct
  REGION 1..11: note = Description of Artificial Sequence: Synthetic peptide
  MOD_RES 6: note = Arg, Lys or His
  MOD_RES 8: note = Arg, Lys or His
  MOD_RES 10: note = Arg, Lys or His
GSPSGXPXSXS

SEQ ID NO: 456 - protein, 11 aa, synthetic construct
  REGION 1..11: note = Description of Artificial Sequence: Synthetic peptide
  MOD_RES 8: note = Arg, Lys or His
  MOD_RES 10: note = Arg, Lys or His
GSPSGTPXSXS

SEQ ID NO: 457 - protein, 11 aa, synthetic construct
  REGION 1..11: note = Description of Artificial Sequence: Synthetic peptide
STRPSRRSRRG

SEQ ID NO: 458 - protein, 13 aa, synthetic construct
  REGION 1..13: note = Description of Artificial Sequence: Synthetic peptide
STRRGTRRGTRRG

SEQ ID NO: 459 - protein, 11 aa, synthetic construct
  REGION 1..11: note = Description of Artificial Sequence: Synthetic peptide
STRPSRGRARG

SEQ ID NO: 460 - protein, 10 aa, synthetic construct
  REGION 1..10: note = Description of Artificial Sequence: Synthetic peptide
STRPSRRARG

SEQ ID NO: 461 - protein, 10 aa, synthetic construct
  REGION 1..10: note = Description of Artificial Sequence: Synthetic peptide
STRPSRRRRG

SEQ ID NO: 462 - protein, 11 aa, synthetic construct
  REGION 1..11: note = Description of Artificial Sequence: Synthetic peptide
STEPSEESEEG

SEQ ID NO: 463 - protein, 13 aa, synthetic construct
  REGION 1..13: note = Description of Artificial Sequence: Synthetic peptide
STEEGTEEGTEEG

SEQ ID NO: 464 - protein, 11 aa, synthetic construct
  REGION 1..11: note = Description of Artificial Sequence: Synthetic peptide
STEPSEGEAEG

SEQ ID NO: 465 - protein, 10 aa, synthetic construct
  REGION 1..10: note = Description of Artificial Sequence: Synthetic peptide
STEPSEEAEG

SEQ ID NO: 466 - protein, 10 aa, synthetic construct
  REGION 1..10: note = Description of Artificial Sequence: Synthetic peptide
STEPSEEEEG

SEQ ID NO: 467 - protein, 6 aa, synthetic construct
  REGION 1..6: note = Description of Artificial Sequence: Synthetic peptide
SASRSA

SEQ ID NO: 468 - protein, 6 aa, synthetic construct
  REGION 1..6: note = Description of Artificial Sequence: Synthetic peptide
SASKSA

SEQ ID NO: 469 - protein, 6 aa, synthetic construct
  REGION 1..6: note = Description of Artificial Sequence: Synthetic peptide
GSGRAT

SEQ ID NO: 470 - protein, 6 aa, synthetic construct
  REGION 1..6: note = Description of Artificial Sequence: Synthetic peptide
EAARHH

SEQ ID NO: 471 - protein, 6 aa, synthetic construct
  REGION 1..6: note = Description of Artificial Sequence: Synthetic peptide
APGRHH

SEQ ID NO: 472 - protein, 6 aa, synthetic construct
  REGION 1..6: note = Description of Artificial Sequence: Synthetic peptide
GSGRGS

SEQ ID NO: 473 - protein, 7 aa, synthetic construct
  REGION 1..7: note = Description of Artificial Sequence: Synthetic peptide
KLTRAET

SEQ ID NO: 474 - protein, 7 aa, synthetic construct
  REGION 1..7: note = Description of Artificial Sequence: Synthetic peptide
DFTRVVG

SEQ ID NO: 475 - protein, 8 aa, synthetic construct
  REGION 1..8: note = Description of Artificial Sequence: Synthetic peptide
TMTRIVGG

SEQ ID NO: 476 - protein, 8 aa, synthetic construct
  REGION 1..8: note = Description of Artificial Sequence: Synthetic peptide
SPFRSTGG

SEQ ID NO: 477 - protein, 8 aa, synthetic construct
  REGION 1..8: note = Description of Artificial Sequence: Synthetic peptide
LQVRIVGG

SEQ ID NO: 478 - protein, 8 aa, synthetic construct
  REGION 1..8: note = Description of Artificial Sequence: Synthetic peptide
PLGRIVGG

SEQ ID NO: 479 - protein, 8 aa, synthetic construct
  REGION 1..8: note = Description of Artificial Sequence: Synthetic peptide
IEGRTVGG

SEQ ID NO: 480 - protein, 8 aa, synthetic construct
  REGION 1..8: note = Description of Artificial Sequence: Synthetic peptide
LTPRSLLV

SEQ ID NO: 481 - protein, 8 aa, synthetic construct
  REGION 1..8: note = Description of Artificial Sequence: Synthetic peptide
LGPVSGVP

SEQ ID NO: 482 - protein, 8 aa, synthetic construct
  REGION 1..8: note = Description of Artificial Sequence: Synthetic peptide
VAGDSLEE

SEQ ID NO: 483 - protein, 8 aa, synthetic construct
  REGION 1..8: note = Description of Artificial Sequence: Synthetic peptide
GPAGLGGA

SEQ ID NO: 484 - protein, 8 aa, synthetic construct
  REGION 1..8: note = Description of Artificial Sequence: Synthetic peptide
GPAGLRGA

SEQ ID NO: 485 - protein, 8 aa, synthetic construct
  REGION 1..8: note = Description of Artificial Sequence: Synthetic peptide
APLGLRLR

SEQ ID NO: 486 - protein, 8 aa, synthetic construct
  REGION 1..8: note = Description of Artificial Sequence: Synthetic peptide
PALPLVAQ

SEQ ID NO: 487 - protein, 7 aa, synthetic construct
  REGION 1..7: note = Description of Artificial Sequence: Synthetic peptide
ENLYFQG

SEQ ID NO: 488 - protein, 8 aa, synthetic construct
  REGION 1..8: note = Description of Artificial Sequence: Synthetic peptide
DDDKIVGG

SEQ ID NO: 489 - protein, 8 aa, synthetic construct
  REGION 1..8: note = Description of Artificial Sequence: Synthetic peptide
LEVLFQGP

SEQ ID NO: 490 - protein, 8 aa, synthetic construct
  REGION 1..8: note = Description of Artificial Sequence: Synthetic peptide
LPKTGSES

SEQ ID NO: 491 - protein, 8 aa, synthetic construct
  REGION 1..8: note = Description of Artificial Sequence: Synthetic peptide
  MOD_RES 2: note = Pro or Ala
  MOD_RES 3: note = Any amino acid
  MOD_RES 6: note = Any amino acid
  MOD_RES 8: note = Any amino acid
GXXGLXGX

SEQ ID NO: 492 - protein, 8 aa, synthetic construct
  REGION 1..8: note = Description of Artificial Sequence: Synthetic peptide
  MOD_RES 3: note = Any amino acid
  MOD_RES 6: note = Any amino acid
  MOD_RES 7: note = Gly or Ala
  MOD_RES 8: note = Any amino acid
GPXGLXXX

SEQ ID NO: 493 - protein, 8 aa, synthetic construct
  REGION 1..8: note = Description of Artificial Sequence: Synthetic peptide
ENLYFQGS

SEQ ID NO: 494 - protein, 8 aa, synthetic construct
  REGION 1..8: note = Description of Artificial Sequence: Synthetic peptide
  MOD_RES 3: note = Lys, Glu, Ala or Asp
  MOD_RES 6: note = Any amino acid
  MOD_RES 7: note = Glu, Lys or Ser
LPXTGXXS

SEQ ID NO: 495 - protein, 12 aa, synthetic construct
  REGION 1..12: note = Description of Artificial Sequence: Synthetic peptide
ADAQKAADNKKP

SEQ ID NO: 496 - protein, 12 aa, synthetic construct
  REGION 1..12: note = Description of Artificial Sequence: Synthetic peptide
KTLVYCSEGSPE

SEQ ID NO: 497 - protein, 12 aa, synthetic construct
  REGION 1..12: note = Description of Artificial Sequence: Synthetic peptide
ENNAQTTNESAG

SEQ ID NO: 498 - protein, 12 aa, synthetic construct
  REGION 1..12: note = Description of Artificial Sequence: Synthetic peptide
KDTIALVVSTLN

SEQ ID NO: 499 - protein, 11 aa, synthetic construct
  REGION 1..11: note = Description of Artificial Sequence: Synthetic peptide
APKDNTWYTGA

SEQ ID NO: 500 - protein, 12 aa, synthetic construct
  REGION 1..12: note = Description of Artificial Sequence: Synthetic peptide
ADVPAGVTLAEK

SEQ ID NO: 501 - protein, 12 aa, synthetic construct
  REGION 1..12: note = Description of Artificial Sequence: Synthetic peptide
KIEEGKLVIWIN

SEQ ID NO: 502 - protein, 10 aa, synthetic construct
  REGION 1..10: note = Description of Artificial Sequence: Synthetic peptide
AEATTAAGGA

SEQ ID NO: 503 - protein, 12 aa, synthetic construct
  REGION 1..12: note = Description of Artificial Sequence: Synthetic peptide
ATGTATSEGSPE

SEQ ID NO: 504 - protein, 12 aa, synthetic construct
  REGION 1..12: note = Description of Artificial Sequence: Synthetic peptide
EPTAATTGESAG

SEQ ID NO: 505 - protein, 10 aa, synthetic construct
  REGION 1..10: note = Description of Artificial Sequence: Synthetic peptide
AETTAPAGST

SEQ ID NO: 506 - protein, 11 aa, synthetic construct
  REGION 1..11: note = Description of Artificial Sequence: Synthetic peptide
APTEATAGTGA

SEQ ID NO: 507 - protein, 11 aa, synthetic construct
  REGION 1..11: note = Description of Artificial Sequence: Synthetic peptide
AETPAGATGAE

SEQ ID NO: 508 - protein, 10 aa, synthetic construct
  REGION 1..10: note = Description of Artificial Sequence: Synthetic peptide
APEEGTAGGA

SEQ ID NO: 509 - protein, 19 aa, synthetic construct
  REGION 1..19: note = Description of Artificial Sequence: Synthetic peptide
SLSTEATAKIVSEFGRDAN

SEQ ID NO: 510 - protein, 19 aa, synthetic construct
  REGION 1..19: note = Description of Artificial Sequence: Synthetic peptide
ANPEQLEEQREETRLIIEE

SEQ ID NO: 511 - protein, 19 aa, synthetic construct
  REGION 1..19: note = Description of Artificial Sequence: Synthetic peptide
SASTEATAKAASEAGRDAN

SEQ ID NO: 512 - protein, 14 aa, synthetic construct
  REGION 1..14: note = Description of Artificial Sequence: Synthetic peptide
ANPEQAEEQREETR

SEQ ID NO: 513 - protein, 13 aa, synthetic construct
  REGION 1..13: note = Description of Artificial Sequence: Synthetic peptide
ANPEQAEEQREET

SEQ ID NO: 514 - protein, 13 aa, synthetic construct
  REGION 1..13: note = Description of Artificial Sequence: Synthetic peptide
ANPEQAEEQSEET

SEQ ID NO: 515 - protein, 13 aa, synthetic construct
  REGION 1..13: note = Description of Artificial Sequence: Synthetic peptide
KNPEQAEEQREET

SEQ ID NO: 516 - protein, 13 aa, synthetic construct
  REGION 1..13: note = Description of Artificial Sequence: Synthetic peptide
KNPEQAEEQSEET

SEQ ID NO: 517 - protein, 17 aa, synthetic construct
  REGION 1..17: note = Description of Artificial Sequence: Synthetic peptide
KNPEQAEEQAEEQREET

SEQ ID NO: 518 - protein, 17 aa, synthetic construct
  REGION 1..17: note = Description of Artificial Sequence: Synthetic peptide
KNPEQAEEQAEEQSEET

SEQ ID NO: 519 - protein, 17 aa, synthetic construct
  REGION 1..17: note = Description of Artificial Sequence: Synthetic peptide
KNHEQAEEQAEEQSEET

SEQ ID NO: 520 - protein, 17 aa, synthetic construct
  REGION 1..17: note = Description of Artificial Sequence: Synthetic peptide
KKHEQAEEQAEEQSEET

SEQ ID NO: 521 - protein, 17 aa, synthetic construct
  REGION 1..17: note = Description of Artificial Sequence: Synthetic peptide
KKPEQAEEQAEEQREET

SEQ ID NO: 522 - protein, 17 aa, synthetic construct
  REGION 1..17: note = Description of Artificial Sequence: Synthetic peptide
KNHEQEKEKAEEQSEET

SEQ ID NO: 523 - protein, 17 aa, synthetic construct
  REGION 1..17: note = Description of Artificial Sequence: Synthetic peptide
KKQEQEEKKAEEQREET

SEQ ID NO: 524 - protein, 17 aa, synthetic construct
  REGION 1..17: note = Description of Artificial Sequence: Synthetic peptide
KNHEKDEKKAEEQSEET

SEQ ID NO: 525 - protein, 17 aa, synthetic construct
  REGION 1..17: note = Description of Artificial Sequence: Synthetic peptide
KKQEQEKEQAEEQREET

SEQ ID NO: 526 - protein, 17 aa, synthetic construct
  REGION 1..17: note = Description of Artificial Sequence: Synthetic peptide
KNPEQEKEKAEEQREET

SEQ ID NO: 527 - protein, 17 aa, synthetic construct
  REGION 1..17: note = Description of Artificial Sequence: Synthetic peptide
KKPEQEEKQAEEQREET

SEQ ID NO: 528 - protein, 21 aa, synthetic construct
  REGION 1..21: note = Description of Artificial Sequence: Synthetic peptide
KKQEQEKEQAEEQAESEREET

SEQ ID NO: 529 - protein, 21 aa, synthetic construct
  REGION 1..21: note = Description of Artificial Sequence: Synthetic peptide
KKQEQEKEQAEEQSQSQREET

SEQ ID NO: 530 - protein, 21 aa, synthetic construct
  REGION 1..21: note = Description of Artificial Sequence: Synthetic peptide
KKQEQEKEQAEEQSESEREET

SEQ ID NO: 531 - protein, 25 aa, synthetic construct
  REGION 1..25: note = Description of Artificial Sequence: Synthetic peptide
KKQEQEKEQAEEQAKAESEAEREET

SEQ ID NO: 532 - protein, 25 aa, synthetic construct
  REGION 1..25: note = Description of Artificial Sequence: Synthetic peptide
KKQEQEKEQAEEQSKSQAEAEREET

SEQ ID NO: 533 - protein, 25 aa, synthetic construct
  REGION 1..25: note = Description of Artificial Sequence: Synthetic peptide
KKQEQEKEQAEEQAQAQAEDEREET

SEQ ID NO: 534 - protein, 25 aa, synthetic construct
  REGION 1..25: note = Description of Artificial Sequence: Synthetic peptide
KKQEQEKEQAEEQSKSKAEDEREET

SEQ ID NO: 535 - protein, 21 aa, synthetic construct
  REGION 1..21: note = Description of Artificial Sequence: Synthetic peptide
KKQEQEKEQAEEQPEVQREET

SEQ ID NO: 536 - protein, 21 aa, synthetic construct
  REGION 1..21: note = Description of Artificial Sequence: Synthetic peptide
KKQEQEKEQAEEQVENPREET

SEQ ID NO: 537 - protein, 21 aa, synthetic construct
  REGION 1..21: note = Description of Artificial Sequence: Synthetic peptide
KKQEQEKEQAEEQELCEREET

SEQ ID NO: 538 - protein, 21 aa, synthetic construct
  REGION 1..21: note = Description of Artificial Sequence: Synthetic peptide
KKQEQEKEQAEEQGIDTREET

SEQ ID NO: 539 - protein, 22 aa, Homo sapiens
GLSKGCFGLKLDRIGSMSGLGC

SEQ ID NO: 540 - protein, 10 aa, Homo sapiens
  MOD_RES 1: note = pyroGlu
  REGION 1..10: note = C-term NH2
EHWSYGLRPG

SEQ ID NO: 541 - protein, 5 aa, synthetic construct
  REGION 1..5: note = Description of Artificial Sequence: Synthetic peptide
  MOD_RES 4: note = D-Phe
  MOD_RES 5: note = NmeVal
RGDFV

SEQ ID NO: 542 - protein, 44 aa, unidentified
  REGION 1..44: note = Description of Unknown: Growth hormone releasing factor polypeptide
YADAIFTNSYRKVLGQLSARKLLQDIMSRQQGESNQERGARARL

SEQ ID NO: 543 - protein, 29 aa, unidentified
  REGION 1..29: note = Description of Unknown: Growth hormone releasing factor peptide
YADAIFTNSYRKVLGQLSARKLLQDIMSR

SEQ ID NO: 544 - protein, 34 aa, Homo sapiens
  REGION 1..34: note = C-term NH2
IKPEAPGEDASPEELNRYYASLRHYLNLVTRQRY

SEQ ID NO: 545 - protein, 146 aa, Homo sapiens
VPIQKVQDDTKTLIKTIVTRINDISHTQSVSSKQKVTGLDFIPGLHPILTLSKMDQTLAVYQQILTSMPSRNVIQISNDLENLRDLLHVLAFSKSCHLPWASGLETLDSLGGVLEASGYSTEVVALSRLQGSLQDMLWQLDLSPGC

SEQ ID NO: 546 - protein, 37 aa, synthetic construct
  REGION 1..37: note = Description of Artificial Sequence: Synthetic polypeptide
  REGION 1..37: note = C-term NH2
KCNTATCATNRLANFLVHSSNNFGPILPPTNVGSNTY

SEQ ID NO: 547 - protein, 9 aa, Homo sapiens
  REGION 1..6: note = misc_feature - Disulfide bridge
  REGION 1..9: note = C-term NH2
CYIQNCPLG

SEQ ID NO: 548 - protein, 29 aa, Homo sapiens
DSWMEEVIKLCGRELVRAQIAICGMSTWS

SEQ ID NO: 549 - protein, 24 aa, Homo sapiens
QLYSALANKCCHVGCTKRSLARFC

SEQ ID NO: 550 - protein, 37 aa, synthetic construct
  REGION 1..37: note = Description of Artificial Sequence: Synthetic polypeptide
GLSKGCFGLKLDRIGSMSGLGCPSLRDPRPNAPSTSA

SEQ ID NO: 551 - protein, 21 aa, synthetic construct
  REGION 1..21: note = Description of Artificial Sequence: Synthetic peptide
  MOD_RES 13: note = 1Nal
  MOD_RES 20: note = Sar
GGLYACHMGPITAVCQPLRXK

SEQ ID NO: 552 - protein, 37 aa, Homo sapiens
HSQGTFTSDYSKYLDSRRAQDFVQWLMNTKRNRNNIA

SEQ ID NO: 553 - protein, 13 aa, synthetic construct
  REGION 1..13: note = Description of Artificial Sequence: Synthetic peptide
  REGION 1..13: note = N-term H
  REGION 2..12: note = misc_feature - Cyclic
  REGION 1..13: note = C-term NH2
ICVVQDWGHHRCT

SEQ ID NO: 554 - protein, 181 aa, Homo sapiens
GPVPTSKPTTTGKGCHIGRFKSLSPQELASFKKARDALEESLKLKNWSCSSPVFPGNWDLRLLQVRERPVALEAELALTLKVLEAAAGPALEDVLDQPLHTLHHILSQLQACIQPQPTAGPRPRGRLHHWLHRLQEAPKKESAGCLEASVTFNLFRLLTRDLKYVADGNLCLRTSTHPEST

SEQ ID NO: 555 - protein, 166 aa, Homo sapiens
MSYNLLGFLQRSSNFQCQKLLWQLNGRLEYCLKDRMNFDIPEEIKQLQQFQKEDAALTIYEMLQNIFAIFRQDSSSTGWNETIVENLLANVYHQINHLKTVLEEKLEKEDFTRGKLMSSLHLKRYYGRILHYLKAKEYSHCAWTIVRVEILRNFYFINRLTGYLRN

SEQ ID NO: 556 - protein, 31 aa, Homo sapiens
EAEDLQVGQVELGGGPGAGSLQPLALEGSLQ

SEQ ID NO: 557 - protein, 28 aa, Homo sapiens
GSSFLSPEHQRVQQRKESKKPPAKLQPR

SEQ ID NO: 558 - protein, 28 aa, Homo sapiens
  REGION 1..28: note = C-term NH2
HSDAVFTDNYTRLRKQMAVKKYLNSILN

SEQ ID NO: 559 - protein, 36 aa, unidentified
YTSLIHSLIEESQNQQEKNEQELLELDKWASLWNWF

SEQ ID NO: 560 - protein, 112 aa, unidentified
  REGION 1..112: note = Description of Unknown: Irisin polypeptide
DSPSAPVNVTVRHLKANSAVVSWDVLEDEVVIGFAISQQKKDVRMLRFIQEVNTTTRSCALWDLEEDTEYIVHVQAISIQGQSPASEPVLFKTPREAEKMASKNKDEVTMKE

SEQ ID NO: 561 - protein, 7 aa, synthetic construct
  REGION 1..7: note = Description of Artificial Sequence: Synthetic peptide
NRVYIHP

SEQ ID NO: 562 - protein, 152 aa, Homo sapiens
DCDIEGKDGKQYESVLMVSIDQLLDSMKEIGSNCLNNEFNFFKRHICDANKEGMFLFRAARKLRQFLKMNSTGDFDLHLLKVSEGTTILLNCTGQVKGRKPAALGEAQPTKSLEENKSLKEQKKLNDLCFLKRLLQEIKTCWNKILMGTKEH

SEQ ID NO: 563 - protein, 180 aa, Homo sapiens
EENVDFRIHVENQTRARDDVSRKQLRLYQLYSRTSGKHIQVLGRRISARGEDGDKYAQLLVETDTFGSQVRIKGKETEFYLCMNRKGKLVGKPDGTSKECVFIEKVLENNYTALMSAKYSGWYVGFTKKGRPRKGPKTRENQQDVHFMKRYPKGQPELQKPFKYTTVTKRSRRIRPTHPA

SEQ ID NO: 564 - protein, 12 aa, synthetic construct
  REGION 1..12: note = Description of Artificial Sequence: Synthetic peptide
  REGION 1..12: note = N-term N-Ac
SYSMGFRWGLPV

SEQ ID NO: 565 - protein, 183 aa, Homo sapiens
HSHRDFQPVLHLVALNSPLSGGMRGIRGADFQCFQQARAVGLAGTFRAFLSSRLQDLYSIVRRADRAAVPIVNLKDELLFPSWEALFSGSEGPLKPGARIFSFDGKDVLRHPTWPQKSVWHGSDPNGRRLTESYCETWRTEAPSATGQASSLLGGRLLGQSAASCHHAYIVLCIENSFMTASK

SEQ ID NO: 566 - protein, 24 aa, Homo sapiens
MAPRGFSCLLLLTSEIDLPVKRRA

SEQ ID NO: 567 - protein, 29 aa, Homo sapiens
HSQGTFTSDYSKYLDSRRAQDFVQWLMNT

SEQ ID NO: 568 - protein, 37 aa, Homo sapiens
HDEFERHAEGTFTSDVSSTLEGQAALEFIAWLVKGRG

SEQ ID NO: 569 - protein, 33 aa, Homo sapiens
HADGSFSDEMNTILDNLAARDFINWLIQTKITD

SEQ ID NO: 570 - protein, 33 aa, synthetic construct
  REGION 1..33: note = Description of Artificial Sequence: Synthetic polypeptide
HGDGSFSDEMNTILDNLAARDFINWLIQTKITD

SEQ ID NO: 571 - protein, 21 aa, Homo sapiens
GIVEQCCTSICSLYQLENYCN

SEQ ID NO: 572 - protein, 30 aa, Homo sapiens
FVNQHLCGSHLVEALYLVCGERGFFYTPKT

SEQ ID NO: 573 - protein, 731 aa, Homo sapiens
SETSRTAFGGRRAVPPNNSNAAEDDLPTVELQGVVPRGVNLQEFLNVTSVHLFKERWDTNKVDHHTDKYENNKLIVRRGQSFYVQIDFSRPYDPRRDLFRVEYVIGRYPQENKGTYIPVPIVSELQSGKWGAKIVMREDRSVRLSIQSSPKCIVGKFRMYVAVWTPYGVLRTSRNPETDTYILFNPWCEDDAVYLDNEKEREEYVLNDIGVIFYGEVNDIKTRSWSYGQFEDGILDTCLYVMDRAQMDLSGRGNPIKVSRVGSAMVNAKDDEGVLVGSWDNIYAYGVPPSAWTGSVDILLEYRSSENPVRYGQCWVFAGVFNTFLRCLGIPARIVTNYFSAHDNDANLQMDIFLEEDGNVNSKLTKDSVWNYHCWNEAWMTRPDLPVGFGGWQAVDSTPQENSDGMYRCGPASVQAIKHGHVCFQFDAPFVFAEVNSDLIYITAKKDGTHVVENVDATHIGKLIVTKQIGGDGMMDITDTYKFQEGQEEERLALETALMYGAKKPLNTEGVMKSRSNVDMDFEVENAVLGKDFKLSITFRNNSHNRYTITAYLSANITFYTGVPKAEFKKETFDVTLEPLSFKKEAVLIQAGEYMGQLLEQASLHFFVTARINETRDVLAKQKSTVLTIPEIIIKVRGTQVVGSDMTVTVQFTNPLKETLRNVWVHLDGPGVTRPMKKMFREIRPNSTVQWEEVCRPWVSGHRKLIASMSSDSLRHVYGELDVQIQRRPSM

SEQ ID NO: 574 - protein, 487 aa, Homo sapiens
GRPLHLVLLSASLAGLLLLGESLFIRREQANNILARVTRANSFLEEMKKGHLERECMEETCSYEEAREVFEDSDKTNEFWNKYKDGDQCETSPCQNQGKCKDGLGEYTCTCLEGFEGKNCELFTRKLCSLDNGDCDQFCHEEQNSVVCSCARGYTLADNGKACIPTGPYPCGKQTLERRKRSVAQATSSSGEAPDSITWKPYDAADLDPTENPFDLLDFNQTQPERGDNNLTRIVGGQECKDGECPWQALLINEENEGFCGGTILSEFYILTAAHCLYQAKRFKVRVGDRNTEQEEGGEAVHEVEVVIKHNRFTKETYDFDIAVLRLKTPITFRMNVAPACLPERDWAESTLMTQKTGIVSGFGRTHEKGRQSTRLKMLEVPYVDRNSCKLSSSFIITQNMFCAGYDTKQEDACQGDSGGPHVTRFKDTYFVTGIVSWGEGCARKGKYGIYTKVTAFLKWIDRSMKTRGLPKAKSHAPEVITSSPLK

SEQ ID NO: 575 - protein, 5 aa, synthetic construct
  REGION 1..5: note = Description of Artificial Sequence: Synthetic peptide
GQQQL

SEQ ID NO: 576 - protein, 5 aa, synthetic construct
  REGION 1..5: note = Description of Artificial Sequence: Synthetic peptide
LPETG

SEQ ID NO: 577 - protein, 6 aa, synthetic construct
  REGION 1..6: note = Description of Artificial Sequence: Synthetic peptide
LPETGG

SEQ ID NO: 578 - protein, 4 aa, synthetic construct
  REGION 1..4: note = Description of Artificial Sequence: Synthetic peptide
GFLG

SEQ ID NO: 579 - protein, 7 aa, synthetic construct
  REGION 1..7: note = Description of Artificial Sequence: Synthetic peptide
  REGION 1..7: note = N-term Epsilon-maleimidocaproyl
  REGION 1..7: note = C-term p-aminobenzyloxycarbonyl-paclitaxel
RSSYYSL

SEQ ID NO: 580 - protein, 6 aa, synthetic construct
  REGION 1..6: note = Description of Artificial Sequence: Synthetic peptide
GPEGPS

SEQ ID NO: 581 - protein, 5 aa, unidentified
  REGION 1..5: note = Description of Unknown: Exemplary targeting moiety peptide
CNGRC

SEQ ID NO: 582 - protein, 6 aa, unidentified
  REGION 1..6: note = Description of Unknown: Exemplary targeting moiety peptide
CNGRCG

SEQ ID NO: 583 - protein, 5 aa, unidentified
  REGION 1..5: note = Description of Unknown: Exemplary targeting moiety peptide
GNGRG

SEQ ID NO: 584 - protein, 5 aa, unidentified
  REGION 1..5: note = Description of Unknown: Exemplary targeting moiety peptide
KNGRE

SEQ ID NO: 585 - protein, 13 aa, unidentified
  REGION 1..13: note = Description of Unknown: Exemplary targeting moiety peptide
GNGRGGNGRGKGK

SEQ ID NO: 586 - protein, 9 aa, unidentified
  REGION 1..9: note = Description of Unknown: Exemplary targeting moiety peptide
CVLNGRMEC

SEQ ID NO: 587 - protein, 6 aa, unidentified
  REGION 1..6: note = Description of Unknown: Exemplary targeting moiety peptide
NGRAHA

SEQ ID NO: 588 - protein, 13 aa, unidentified
  REGION 1..13: note = Description of Unknown: Exemplary targeting moiety peptide
CNGRCVSGCAGRC

SEQ ID NO: 589 - protein, 9 aa, unidentified
  REGION 1..9: note = Description of Unknown: Exemplary targeting moiety peptide
CGNKRTRGC

SEQ ID NO: 590 - protein, 10 aa, unidentified
  REGION 1..10: note = Description of Unknown: Exemplary targeting moiety peptide
TAASGVRSMH

SEQ ID NO: 591 - protein, 10 aa, unidentified
  REGION 1..10: note = Description of Unknown: Exemplary targeting moiety peptide
LTLRWVGLMS

SEQ ID NO: 592 - protein, 9 aa, unidentified
  REGION 1..9: note = Description of Unknown: Exemplary targeting moiety peptide
CNRRTKAGC

SEQ ID NO: 593 - protein, 9 aa, unidentified
  REGION 1..9: note = Description of Unknown: Exemplary targeting moiety peptide
CLSDGKRKC

SEQ ID NO: 594 - protein, 9 aa, unidentified
  REGION 1..9: note = Description of Unknown: Exemplary targeting moiety peptide
CREAGRKAC

SEQ ID NO: 595 - protein, 9 aa, unidentified
  REGION 1..9: note = Description of Unknown: Exemplary targeting moiety peptide
CAGRRSAYC

SEQ ID NO: 596 - protein, 6 aa, unidentified
  REGION 1..6: note = Description of Unknown: Exemplary targeting moiety peptide
CRSRKG

SEQ ID NO: 597 - protein, 7 aa, unidentified
  REGION 1..7: note = Description of Unknown: Exemplary targeting moiety peptide
CKAAKNK

SEQ ID NO: 598 - protein, 9 aa, unidentified
  REGION 1..9: note = Description of Unknown: Exemplary targeting moiety peptide
CSRPRRSEC

SEQ ID NO: 599 - protein, 5 aa, unidentified
  REGION 1..5: note = Description of Unknown: Exemplary targeting moiety peptide
CGKRK

SEQ ID NO: 600 - protein, 5 aa, unidentified
  REGION 1..5: note = Description of Unknown: Exemplary targeting moiety peptide
CDTRL

SEQ ID NO: 601 - protein, 7 aa, unidentified
  REGION 1..7: note = Description of Unknown: Exemplary targeting moiety peptide
CGTKRKC

SEQ ID NO: 602 - protein, 10 aa, synthetic construct
  REGION 1..10: note = Description of Artificial Sequence: Synthetic peptide
  MOD_RES 1: note = pGlu
  REGION 1..10: note = C-term NH2
EHWSYGLRPG

SEQ ID NO: 603 - protein, 10 aa, synthetic construct
  REGION 1..10: note = Description of Artificial Sequence: Synthetic peptide
  MOD_RES 1: note = pGlu
  MOD_RES 6: note = D-Lys
  REGION 1..10: note = C-term NH2
EHWSYKLRPG

SEQ ID NO: 604 - protein, 10 aa, synthetic construct
  REGION 1..10: note = Description of Artificial Sequence: Synthetic peptide
  MOD_RES 1: note = pGlu
  MOD_RES 6: note = D-Trp
  REGION 1..10: note = C-term NH2
EHWSYWLRPG

SEQ ID NO: 605 - protein, 9 aa, synthetic construct
  REGION 1..9: note = Description of Artificial Sequence: Synthetic peptide
  MOD_RES 1: note = pGlu
  MOD_RES 6: note = D-Leu
  REGION 1..9: note = C-term NHEt
EHWSYLLRP

SEQ ID NO: 606 - protein, 9 aa, synthetic construct
  REGION 1..9: note = Description of Artificial Sequence: Synthetic peptide
  MOD_RES 1: note = pGlu
  MOD_RES 6: note = D-Ser(tBu)
  REGION 1..9: note = C-term NHEt
EHWSYSLRP

SEQ ID NO: 607 - protein, 10 aa, synthetic construct
  REGION 1..10: note = Description of Artificial Sequence: Synthetic peptide
  MOD_RES 1: note = pGlu
  MOD_RES 6: note = D-2-Nal
  REGION 1..10: note = C-term NH2
EHWSYALRPG

SEQ ID NO: 608 - protein, 9 aa, synthetic construct
  REGION 1..9: note = Description of Artificial Sequence: Synthetic peptide
  MOD_RES 1: note = pGlu
  MOD_RES 6: note = D-His(Bzl)
  REGION 1..9: note = C-term NHEt
EHWSYHLRP

SEQ ID NO: 609 - protein, 10 aa, synthetic construct
  REGION 1..10: note = Description of Artificial Sequence: Synthetic peptide
  MOD_RES 1: note = pGlu
  MOD_RES 6: note = D-Ser(tBu)
  MOD_RES 10: note = AzaGly
  REGION 1..10: note = C-term NH2
EHWSYSLRPG

SEQ ID NO: 610 - protein, 9 aa, synthetic construct
  REGION 1..9: note = Description of Artificial Sequence: Synthetic peptide
  MOD_RES 1: note = pGlu
  MOD_RES 6: note = D-Trp
  REGION 1..9: note = C-term NHEt
EHWSYWLRP

SEQ ID NO: 611 - protein, 10 aa, synthetic construct
  REGION 1..10: note = Description of Artificial Sequence: Synthetic peptide
  MOD_RES 1: note = pGlu
  REGION 1..10: note = C-term NH2
EHWSHDWLPG

SEQ ID NO: 612 - DNA, 36 bp, synthetic construct
  misc_feature 1..36: note = Description of Artificial Sequence: Synthetic oligonucleotide
  source 1..36: mol_type = other DNA
aggtgaatctccdggtggytcyagcggttcygartc

SEQ ID NO: 613 - DNA, 36 bp, synthetic construct
  misc_feature 1..36: note = Description of Artificial Sequence: Synthetic oligonucleotide
  source 1..36: mol_type = other DNA
acctgaytcrgaaccgctrgarccacchggagattc

SEQ ID NO: 614 - DNA, 36 bp, synthetic construct
  misc_feature 1..36: note = Description of Artificial Sequence: Synthetic oligonucleotide
  source 1..36: mol_type = other DNA
aggtagcgaaggttcttcyggtccdggygartcytc

SEQ ID NO: 615 - DNA, 36 bp, synthetic construct
  misc_feature 1..36: note = Description of Artificial Sequence: Synthetic oligonucleotide
  source 1..36: mol_type = other DNA
acctgargaytcrcchggaccrgaagaaccttcgct

SEQ ID NO: 616 - DNA, 36 bp, synthetic construct
  misc_feature 1..36: note = Description of Artificial Sequence: Synthetic oligonucleotide
  source 1..36: mol_type = other DNA
aggttcytcygaaagcggttcttcygarggyggtcc

SEQ ID NO: 617 - DNA, 36 bp, synthetic construct
  misc_feature 1..36: note = Description of Artificial Sequence: Synthetic oligonucleotide
  source 1..36: mol_type = other DNA
acctggaccrccytcrgaagaaccgctttcrgarga

SEQ ID NO: 618 - DNA, 36 bp, synthetic construct
  misc_feature 1..36: note = Description of Artificial Sequence: Synthetic oligonucleotide
  source 1..36: mol_type = other DNA
aggttcyggtggygaaccdtcygartctggtagctc

SEQ ID NO: 619 - DNA, 24 bp, synthetic construct
  misc_feature 1..24: note = Description of Artificial Sequence: Synthetic oligonucleotide
  source 1..24: mol_type = other DNA
aggttcgtcttcactcgagggtac

SEQ ID NO: 620 - DNA, 16 bp, synthetic construct
  misc_feature 1..16: note = Description of Artificial Sequence: Synthetic oligonucleotide
  source 1..16: mol_type = other DNA
cctcgagtgaagacga

SEQ ID NO: 621 - protein, 36 aa, synthetic construct
  REGION 1..36: note = Description of Artificial Sequence: Synthetic polypeptide
GSGGEPSESGSSGESPGGSSGSESGESPGGSSGSES

SEQ ID NO: 622 - protein, 36 aa, synthetic construct
  REGION 1..36: note = Description of Artificial Sequence: Synthetic polypeptide
GSEGSSGPGESSGESPGGSSGSESGSSESGSSEGGP

SEQ ID NO: 623 - protein, 36 aa, synthetic construct
  REGION 1..36: note = Description of Artificial Sequence: Synthetic polypeptide
GSSESGSSEGGPGSSESGSSEGGPGESPGGSSGSES

SEQ ID NO: 624 - protein, 36 aa, synthetic construct
  REGION 1..36: note = Description of Artificial Sequence: Synthetic polypeptide
GSGGEPSESGSSGSSESGSSEGGPGSGGEPSESGSS

SEQ ID NO: 625 - protein, 36 aa, synthetic construct
  REGION 1..36: note = Description of Artificial Sequence: Synthetic polypeptide
GSSESGSSEGGPGSEGSSGPGESSGSEGSSGPGESS

SEQ ID NO: 626 - protein, 36 aa, synthetic construct
  REGION 1..36: note = Description of Artificial Sequence: Synthetic polypeptide
GSSESGSSEGGPGESPGGSSGSESGSEGSSGPGESS

SEQ ID NO: 627 - protein, 36 aa, synthetic construct
  REGION 1..36: note = Description of Artificial Sequence: Synthetic polypeptide
GSGGEPSESGSSGSGGEPSESGSSGSEGSSGPGESS

SEQ ID NO: 628 - protein, 36 aa, synthetic construct
  REGION 1..36: note = Description of Artificial Sequence: Synthetic polypeptide
GSSESGSSEGGPGSEGSSGPGESSGESPGGSSGSES

SEQ ID NO: 629 - protein, 36 aa, synthetic construct
  REGION 1..36: note = Description of Artificial Sequence: Synthetic polypeptide
GSSESGSSEGGPGSSESGSSEGGPGSSESGSSEGGP

SEQ ID NO: 630 - protein, 36 aa, synthetic construct
  REGION 1..36: note = Description of Artificial Sequence: Synthetic polypeptide
GSGGEPSESGSSGSEGSSGPGESSGSSESGSSEGGP

SEQ ID NO: 631 - protein, 36 aa, synthetic construct; identical to SEQ ID NO: 624
  REGION 1..36: note = Description of Artificial Sequence: Synthetic polypeptide

SEQ ID NO: 632 - protein, 36 aa, synthetic construct
  REGION 1..36: note = Description of Artificial Sequence: Synthetic polypeptide
GSGGEPSESGSSGSSESGSSEGGPGESPGGSSGSES

SEQ ID NO: 633 - protein, 36 aa, synthetic construct
  REGION 1..36: note = Description of Artificial Sequence: Synthetic polypeptide
GSGGEPSESGSSGESPGGSSGSESGSEGSSGPGESS

SEQ ID NO: 634 - protein, 36 aa, synthetic construct
  REGION 1..36: note = Description of Artificial Sequence: Synthetic polypeptide
GSGGEPSESGSSGESPGGSSGSESGSGGEPSESGSS

SEQ ID NO: 635 - protein, 36 aa, synthetic construct; identical to SEQ ID NO: 629
  REGION 1..36: note = Description of Artificial Sequence: Synthetic polypeptide

SEQ ID NO: 636 - protein, 36 aa, synthetic construct
  REGION 1..36: note = Description of Artificial Sequence: Synthetic polypeptide
GESPGGSSGSESGSEGSSGPGESSGSEGSSGPGESS

SEQ ID NO: 637 - protein, 36 aa, synthetic construct
  REGION 1..36: note = Description of Artificial Sequence: Synthetic polypeptide
GSGGEPSESGSSGSGGEPSESGSSGSSESGSSEGGP

SEQ ID NO: 638 - protein, 36 aa, synthetic construct
  REGION 1..36: note = Description of Artificial Sequence: Synthetic polypeptide
GSGGEPSESGSSGSGGEPSESGSSGSGGEPSESGSS

SEQ ID NO: 639 - protein, 36 aa, synthetic construct
  REGION 1..36: note = Description of Artificial Sequence: Synthetic polypeptide
GSGGEPSESGSSGSSESGSSEGGPGSEGSSGPGESS

SEQ ID NO: 640 - protein, 36 aa, synthetic construct
  REGION 1..36: note = Description of Artificial Sequence: Synthetic polypeptide
GSGGEPSESGSSGSEGSSGPGESSGSGGEPSESGSS

SEQ ID NO: 641 - protein, 36 aa, synthetic construct; identical to SEQ ID NO: 634
  REGION 1..36: note = Description of Artificial Sequence: Synthetic polypeptide

SEQ ID NO: 642 - protein, 36 aa, synthetic construct
  REGION 1..36: note = Description of Artificial Sequence: Synthetic polypeptide
GSSESGSSEGGPGSGGEPSESGSSGSSESGSSEGGP

SEQ ID NO: 643 - protein, 36 aa, synthetic construct
  REGION 1..36: note = Description of Artificial Sequence: Synthetic polypeptide
GSEGSSGPGESSGESPGGSSGSESGSEGSSGPGESS

SEQ ID NO: 644 - protein, 36 aa, synthetic construct; identical to SEQ ID NO: 629
  REGION 1..36: note = Description of Artificial Sequence: Synthetic polypeptide

SEQ ID NO: 645 - protein, 36 aa, synthetic construct; identical to SEQ ID NO: 621
  REGION 1..36: note = Description of Artificial Sequence: Synthetic polypeptide

SEQ ID NO: 646 - protein, 36 aa, synthetic construct
  REGION 1..36: note = Description of Artificial Sequence: Synthetic polypeptide
GSGGEPSESGSSGSEGSSGPGESSGESPGGSSGSES

SEQ ID NO: 647 - protein, 36 aa, synthetic construct
  REGION 1..36: note = Description of Artificial Sequence: Synthetic polypeptide
GESPGGSSGSESGESPGGSSGSESGESPGGSSGSES

SEQ ID NO: 648 - protein, 36 aa, synthetic construct
  REGION 1..36: note = Description of Artificial Sequence: Synthetic polypeptide
GSEGSSGPGESSGSEGSSGPGESSGSGGEPSESGSS

SEQ ID NO: 649 - protein, 36 aa, synthetic construct; identical to SEQ ID NO: 646
  REGION 1..36: note = Description of Artificial Sequence: Synthetic polypeptide

SEQ ID NO: 650 - protein, 36 aa, synthetic construct; identical to SEQ ID NO: 624
  REGION 1..36: note = Description of Artificial Sequence: Synthetic polypeptide

SEQ ID NO: 651 - protein, 36 aa, synthetic construct
  REGION 1..36: note = Description of Artificial Sequence: Synthetic polypeptide
GSSESGSSEGGPGSGGEPSESGSSGSEGSSGPGESS

SEQ ID NO: 652 - protein, 36 aa, synthetic construct
  REGION 1..36: note = Description of Artificial Sequence: Synthetic polypeptide
GSGGEPSESGSSGSEGSSGPGESSGSEGSSGPGESS

SEQ ID NO: 653 - protein, 36 aa, synthetic construct; identical to SEQ ID NO: 624
  REGION 1..36: note = Description of Artificial Sequence: Synthetic polypeptide

SEQ ID NO: 654 - protein, 36 aa, synthetic construct; identical to SEQ ID NO: 621
  REGION 1..36: note = Description of Artificial Sequence: Synthetic polypeptide

SEQ ID NO: 655 - protein, 36 aa, synthetic construct
  REGION 1..36: note = Description of Artificial Sequence: Synthetic polypeptide
GSGGEPSESGSSGSGGEPSESGSSGESPGGSSGSES

SEQ ID NO: 656 - protein, 36 aa, synthetic construct
  REGION 1..36: note = Description of Artificial Sequence: Synthetic polypeptide
GSEGSSGPGESSGSSESGSSEGGPGSEGSSGPGESS

SEQ ID NO: 657 - protein, 36 aa, synthetic construct
  REGION 1..36: note = Description of Artificial Sequence: Synthetic polypeptide
GSSESGSSEGGPGESPGGSSGSESGESPGGSSGSES

SEQ ID NO: 658 - protein, 36 aa, synthetic construct; identical to SEQ ID NO: 648
  REGION 1..36: note = Description of Artificial Sequence: Synthetic polypeptide

SEQ ID NO: 659 - DNA, 108 bp, synthetic construct
  misc_feature 1..108: note = Description of Artificial Sequence: Synthetic polynucleotide
  source 1..108: mol_type = other DNA
ggttctggtggcgaaccgtccgagtctggtagctcaggtgaatctccgggtggctctagcggttccgagtcaggtgaatctcctggtggttccagcggttccgagtca

SEQ ID NO: 660 - DNA, 108 bp, synthetic construct
  misc_feature 1..108: note = Description of Artificial Sequence: Synthetic polynucleotide
  source 1..108: mol_type = other DNA
ggtagcgaaggttcttctggtcctggcgagtcttcaggtgaatctcctggtggttccagcggttctgaatcaggttcctccgaaagcggttcttccgagggcggtcca

SEQ ID NO: 661 - DNA, 108 bp, synthetic construct
  misc_feature 1..108: note = Description of Artificial Sequence: Synthetic polynucleotide
  source 1..108: mol_type = other DNA
ggttcctctgaaagcggttcttccgaaggtggtccaggttcctctgaaagcggttcttctgagggtggtccaggtgaatctccgggtggctccagcggttccgagtca

SEQ ID NO: 662 - DNA, 108 bp, synthetic construct
  misc_feature 1..108: note = Description of Artificial Sequence: Synthetic polynucleotide
  source 1..108: mol_type = other DNA
ggttccggtggcgaaccgtctgaatctggtagctcaggttcttctgaaagcggttcttccgagggtggtccaggttctggtggtgaaccttccgagtctggtagctca

SEQ ID NO: 663 - DNA, 108 bp, synthetic construct
  misc_feature 1..108: note = Description of Artificial Sequence: Synthetic polynucleotide
  source 1..108: mol_type = other DNA
ggttcttccgaaagcggttcttctgagggtggtccaggtagcgaaggttcttccggtccaggtgagtcttcaggtagcgaaggttcttctggtcctggtgaatcttca

SEQ ID NO: 664 - DNA, 108 bp, synthetic construct
  misc_feature 1..108: note = Description of Artificial Sequence: Synthetic polynucleotide
  source 1..108: mol_type = other DNA
ggttcctctgaaagcggttcttccgagggtggtccaggtgaatctccaggtggttccagcggttctgagtcaggtagcgaaggttcttctggtccaggtgaatcctca

SEQ ID NO: 665 - DNA, 108 bp, synthetic construct
  misc_feature 1..108: note = Description of Artificial Sequence: Synthetic polynucleotide
  source 1..108: mol_type = other DNA
ggttctggtggtgaaccgtctgagtctggtagctcaggttccggtggcgaaccatccgaatctggtagctcaggtagcgaaggttcttccggtccaggtgagtcttca

SEQ ID NO: 666 - DNA, 108 bp, synthetic construct
  misc_feature 1..108: note = Description of Artificial Sequence: Synthetic polynucleotide
  source 1..108: mol_type = other DNA
ggttcttccgaaagcggttcttccgaaggcggtccaggtagcgaaggttcttctggtccaggcgaatcttcaggtgaatctcctggtggctccagcggttctgagtca

SEQ ID NO: 667 - DNA, 108 bp, synthetic construct
  misc_feature 1..108: note = Description of Artificial Sequence: Synthetic polynucleotide
  source 1..108: mol_type = other DNA
ggttcctccgaaagcggttcttctgagggcggtccaggttcctccgaaagcggttcttccgagggcggtccaggttcttctgaaagcggttcttccgagggcggtcca

SEQ ID NO: 668 - DNA, 108 bp, synthetic construct
  misc_feature 1..108: note = Description of Artificial Sequence: Synthetic polynucleotide
  source 1..108: mol_type = other DNA
ggttccggtggcgaaccgtccgaatctggtagctcaggtagcgaaggttcttctggtccaggcgaatcttcaggttcctctgaaagcggttcttctgagggcggtcca

SEQ ID NO: 669 - DNA, 108 bp, synthetic construct
  misc_feature 1..108: note = Description of Artificial Sequence: Synthetic polynucleotide
  source 1..108: mol_type = other DNA
ggttctggtggtgaaccgtccgaatctggtagctcaggttcttccgaaagcggttcttctgaaggtggtccaggttccggtggcgaaccttctgaatctggtagctca

SEQ ID NO: 670 - DNA, 108 bp, synthetic construct
  misc_feature 1..108: note = Description of Artificial Sequence: Synthetic polynucleotide
  source 1..108: mol_type = other DNA
ggttctggtggcgaaccgtccgaatctggtagctcaggttcctccgaaagcggttcttctgaaggtggtccaggtgaatctccaggtggttctagcggttctgaatca

SEQ ID NO: 671 - DNA, 108 bp, synthetic construct
  misc_feature 1..108: note = Description of Artificial Sequence: Synthetic polynucleotide
  source 1..108: mol_type = other DNA
ggttctggtggcgaaccgtctgagtctggtagctcaggtgaatctcctggtggctccagcggttctgaatcaggtagcgaaggttcttctggtcctggtgaatcttca

SEQ ID NO: 672 - DNA, 108 bp, synthetic construct
  misc_feature 1..108: note = Description of Artificial Sequence: Synthetic polynucleotide
  source 1..108: mol_type = other DNA
ggttccggtggcgaaccttccgaatctggtagctcaggtgaatctccgggtggttctagcggttctgagtcaggttctggtggtgaaccttccgagtctggtagctca

SEQ ID NO: 673 - DNA, 108 bp, synthetic construct
  misc_feature 1..108: note = Description of Artificial Sequence: Synthetic polynucleotide
  source 1..108: mol_type = other DNA
ggttcctctgaaagcggttcttctgagggcggtccaggttcttccgaaagcggttcttccgagggcggtccaggttcttccgaaagcggttcttctgaaggcggtcca

SEQ ID NO: 674 - DNA, 108 bp, synthetic construct
  misc_feature 1..108: note = Description of Artificial Sequence: Synthetic polynucleotide
  source 1..108: mol_type = other DNA
ggtgaatctccgggtggctccagcggttctgagtcaggtagcgaaggttcttccggtccgggtgagtcctcaggtagcgaaggttcttccggtcctggtgagtcttca

SEQ ID NO: 675 - DNA, 108 bp, synthetic construct
  misc_feature 1..108: note = Description of Artificial Sequence: Synthetic polynucleotide
  source 1..108: mol_type = other DNA
ggttctggtggcgaaccttccgaatctggtagctcaggttccggtggtgaaccttctgaatctggtagctcaggttcttctgaaagcggttcttccgagggcggtcca

SEQ ID NO: 676 - DNA, 108 bp, synthetic construct
  misc_feature 1..108: note = Description of Artificial Sequence: Synthetic polynucleotide
  source 1..108: mol_type = other DNA
ggttccggtggtgaaccttctgaatctggtagctcaggttccggtggcgaaccatccgagtctggtagctcaggttccggtggtgaaccatccgagtctggtagctca

SEQ ID NO: 677 - DNA, 108 bp, synthetic construct
  misc_feature 1..108: note = Description of Artificial Sequence: Synthetic polynucleotide
  source 1..108: mol_type = other DNA
ggttccggtggcgaaccttctgaatctggtagctcaggttcctccgaaagcggttcttctgagggcggtccaggtagcgaaggttcttctggtccgggcgagtcttca

SEQ ID NO: 678 - DNA, 108 bp, synthetic construct
  misc_feature 1..108: note = Description of Artificial Sequence: Synthetic polynucleotide
  source 1..108: mol_type = other DNA
ggttccggtggtgaaccgtccgagtctggtagctcaggtagcgaaggttcttctggtccgggtgagtcttcaggttctggtggcgaaccgtccgaatctggtagctca

SEQ ID NO: 679 - DNA, 108 bp, synthetic construct
  misc_feature 1..108: note = Description of Artificial Sequence: Synthetic polynucleotide
  source 1..108: mol_type = other DNA
ggttctggtggcgaaccgtccgaatctggtagctcaggtgaatctcctggtggttccagcggttccgagtcaggttctggtggcgaaccttccgaatctggtagctca

SEQ ID NO: 680 - DNA, 108 bp, synthetic construct
  misc_feature 1..108: note = Description of Artificial Sequence: Synthetic polynucleotide
  source 1..108: mol_type = other DNA
ggttcttccgaaagcggttcttccgagggcggtccaggttccggtggtgaaccatctgaatctggtagctcaggttcttctgaaagcggttcttctgaaggtggtcca

SEQ ID NO: 681 - DNA, 108 bp, synthetic construct
  misc_feature 1..108: note = Description of Artificial Sequence: Synthetic polynucleotide
  source 1..108: mol_type = other DNA
ggtagcgaaggttcttccggtcctggtgagtcttcaggtgaatctccaggtggctctagcggttccgagtcaggtagcgaaggttcttctggtcctggcgagtcctca

SEQ ID NO: 682 - DNA, 108 bp, synthetic construct
  misc_feature 1..108: note = Description of Artificial Sequence: Synthetic polynucleotide
  source 1..108: mol_type = other DNA
ggttcctctgaaagcggttcttccgaaggcggtccaggttcttccgaaagcggttcttctgagggcggtccaggttcctccgaaagcggttcttctgagggtggtcca

SEQ ID NO: 683 - DNA, 108 bp, synthetic construct
  misc_feature 1..108: note = Description of Artificial Sequence: Synthetic polynucleotide
  source 1..108: mol_type = other DNA
ggttctggtggcgaaccttccgagtctggtagctcaggtgaatctccgggtggttctagcggttccgagtcaggtgaatctccgggtggttccagcggttctgagtca

SEQ ID NO: 684 - DNA, 108 bp, synthetic construct
  misc_feature 1..108: note = Description of Artificial Sequence: Synthetic polynucleotide
  source 1..108: mol_type = other DNA
ggttctggtggcgaaccatctgagtctggtagctcaggtagcgaaggttcttccggtccaggcgagtcttcaggtgaatctcctggtggctccagcggttctgagtca

SEQ ID NO: 685 - DNA, 108 bp, synthetic construct
  misc_feature 1..108: note = Description of Artificial Sequence: Synthetic polynucleotide
  source 1..108: mol_type = other DNA
ggtgaatctcctggtggttccagcggttccgagtcaggtgaatctccaggtggctctagcggttccgagtcaggtgaatctcctggtggttctagcggttctgaatca

SEQ ID NO: 686 - DNA, 108 bp, synthetic construct
  misc_feature 1..108: note = Description of Artificial Sequence: Synthetic polynucleotide
  source 1..108: mol_type = other DNA
ggtagcgaaggttcttccggtccaggtgaatcttcaggtagcgaaggttcttctggtcctggtgaatcctcaggttccggtggcgaaccatctgaatctggtagctca

SEQ ID NO: 687 - DNA, 108 bp, synthetic construct
  misc_feature 1..108: note = Description of Artificial Sequence: Synthetic polynucleotide
  source 1..108: mol_type = other DNA
ggttctggtggcgaaccatccgaatctggtagctcaggtagcgaaggttcttctggtcctggcgaatcttcaggtgaatctccaggtggctctagcggttccgaatca

SEQ ID NO: 688 - DNA, 108 bp, synthetic construct
  misc_feature 1..108: note = Description of Artificial Sequence: Synthetic polynucleotide
  source 1..108: mol_type = other DNA
ggttccggtggtgaaccgtccgaatctggtagctcaggttcctctgaaagcggttcttccgagggtggtccaggttccggtggtgaaccttctgagtctggtagctca

SEQ ID NO: 689 - DNA, 108 bp, synthetic construct
  misc_feature 1..108: note = Description of Artificial Sequence: Synthetic polynucleotide
  source 1..108: mol_type = other DNA
ggttcctctgaaagcggttcttctgagggcggtccaggttctggtggcgaaccatctgaatctggtagctcaggtagcgaaggttcttccggtccgggtgaatcttca

SEQ ID NO: 690 - DNA, 108 bp, synthetic construct
  misc_feature 1..108: note = Description of Artificial Sequence: Synthetic polynucleotide
  source 1..108: mol_type = other DNA
ggttctggtggtgaaccgtccgaatctggtagctcaggtagcgaaggttcttctggtcctggcgagtcttcaggtagcgaaggttcttctggtcctggtgaatcttca

SEQ ID NO: 691 - DNA, 108 bp, synthetic construct
  misc_feature 1..108: note = Description of Artificial Sequence: Synthetic polynucleotide
  source 1..108: mol_type = other DNA
ggttctggtggcgaaccatccgagtctggtagctcaggttcttccgaaagcggttcttccgaaggcggtccaggttctggtggtgaaccgtccgaatctggtagctca

SEQ ID NO: 692 - DNA, 108 bp, synthetic construct
  misc_feature 1..108: note = Description of Artificial Sequence: Synthetic polynucleotide
  source 1..108: mol_type = other DNA
ggttccggtggcgaaccttccgaatctggtagctcaggtgaatctccgggtggttctagcggttccgaatcaggtgaatctccaggtggttctagcggttccgaatca

SEQ ID NO: 693 - DNA, 108 bp, synthetic construct
  misc_feature 1..108: note = Description of Artificial Sequence: Synthetic polynucleotide
  source 1..108: mol_type = other DNA
ggttccggtggtgaaccatctgagtctggtagctcaggttccggtggcgaaccgtccgagtctggtagctcaggtgaatctccgggtggttccagcggttccgaatca

SEQ ID NO: 694 - DNA, 108 bp, synthetic construct
  misc_feature 1..108: note = Description of Artificial Sequence: Synthetic polynucleotide
  source 1..108: mol_type = other DNA
ggtagcgaaggttcttctggtccgggcgaatcctcaggttcctccgaaagcggttcttccgaaggtggtccaggtagcgaaggttcttccggtcctggtgaatcttca

SEQ ID NO: 695 - DNA, 108 bp, synthetic construct
  misc_feature 1..108: note = Description of Artificial Sequence: Synthetic polynucleotide
  source 1..108: mol_type = other DNA
ggttcctctgaaagcggttcttctgaaggcggtccaggtgaatctccgggtggctccagcggttctgaatcaggtgaatctcctggtggctccagcggttccgagtca

SEQ ID NO: 696 - DNA, 108 bp, synthetic construct
  misc_feature 1..108: note = Description of Artificial Sequence: Synthetic polynucleotide
  source 1..108: mol_type = other DNA
ggtagcgaaggttcttctggtccaggcgagtcttcaggtagcgaaggttcttccggtcctggcgagtcttcaggttccggtggcgaaccgtccgaatctggtagctca

SEQ ID NO: 697 - DNA, 36 bp, synthetic construct
  misc_feature 1..36: note = Description of Artificial Sequence: Synthetic oligonucleotide
  source 1..36: mol_type = other DNA
aggtagcccdgcwggytctccdacytcyacygarga

SEQ ID NO: 698 - DNA, 36 bp, synthetic construct
  misc_feature 1..36: note = Description of Artificial Sequence: Synthetic oligonucleotide
  source 1..36: mol_type = other DNA
accttcytcrgtrgargthggagarccwgchgggct

SEQ ID NO: 699 - DNA, 36 bp, synthetic construct
  misc_feature 1..36: note = Description of Artificial Sequence: Synthetic oligonucleotide
  source 1..36: mol_type = other DNA
aggtagcgaacckgcwacytcyggytctgaracycc

SEQ ID NO: 700 - DNA, 36 bp, synthetic construct
  misc_feature 1..36: note = Description of Artificial Sequence: Synthetic oligonucleotide
  source 1..36: mol_type = other DNA
acctggrgtytcagarccrgargtwgcmggttcgct

SEQ ID NO: 701 - DNA, 36 bp, synthetic construct
  misc_feature 1..36: note = Description of Artificial Sequence: Synthetic oligonucleotide
  source 1..36: mol_type = other DNA
aggtacytctgaaagcgcwacycckgartcyggycc

SEQ ID NO: 702 - DNA, 36 bp, synthetic construct
  misc_feature 1..36: note = Description of Artificial Sequence: Synthetic oligonucleotide
  source 1..36: mol_type = other DNA
acctggrccrgaytcmggrgtwgcgctttcagargt

SEQ ID NO: 703 - DNA, 36 bp, synthetic construct
  misc_feature 1..36: note = Description of Artificial Sequence: Synthetic oligonucleotide
  source 1..36: mol_type = other DNA
aggtacytctacygaaccktcygarggyagcgcwcc

SEQ ID NO: 704 - DNA, 36 bp, synthetic construct
  misc_feature 1..36: note = Description of Artificial Sequence: Synthetic oligonucleotide
  source 1..36: mol_type = other DNA
acctggwgcgctrccytcrgamggttcrgtagargt

SEQ ID NO: 705 - protein, 36 aa, synthetic construct
  REGION 1..36: note = Description of Artificial Sequence: Synthetic polypeptide
GSPAGSPTSTEEGTSESATPESGPGTSTEPSEGSAP

SEQ ID NO: 706 - protein, 36 aa, synthetic construct
  REGION 1..36: note = Description of Artificial Sequence: Synthetic polypeptide
GTSTEPSEGSAPGTSTEPSEGSAPGTSTEPSEGSAP

SEQ ID NO: 707 - protein, 36 aa, synthetic construct
  REGION 1..36: note = Description of Artificial Sequence: Synthetic polypeptide
GTSTEPSEGSAPGTSESATPESGPGTSESATPESGP

SEQ ID NO: 708 - protein, 36 aa, synthetic construct; identical to SEQ ID NO: 707
  REGION 1..36: note = Description of Artificial Sequence: Synthetic polypeptide

SEQ ID NO: 709 - protein, 36 aa, synthetic construct
  REGION 1..36: note = Description of Artificial Sequence: Synthetic polypeptide
GSEPATSGSETPGTSESATPESGPGSPAGSPTSTEE

SEQ ID NO: 710 - protein, 36 aa, synthetic construct
  REGION 1..36: note = Description of Artificial Sequence: Synthetic polypeptide
GTSESATPESGPGSEPATSGSETPGTSTEPSEGSAP

SEQ ID NO: 711 - protein, 36 aa, synthetic construct
  REGION 1..36: note = Description of Artificial Sequence: Synthetic polypeptide
GSPAGSPTSTEEGSPAGSPTSTEEGSEPATSGSETP

SEQ ID NO: 712 - protein, 36 aa, synthetic construct; identical to SEQ ID NO: 705
  REGION 1..36: note = Description of Artificial Sequence: Synthetic polypeptide

SEQ ID NO: 713 - protein, 36 aa, synthetic construct
  REGION 1..36: note = Description of Artificial Sequence: Synthetic polypeptide
GSPAGSPTSTEEGSPAGSPTSTEEGTSTEPSEGSAP

SEQ ID NO: 714 - protein, 36 aa, synthetic construct
  REGION 1..36: note = Description of Artificial Sequence: Synthetic polypeptide
GTSESATPESGPGTSTEPSEGSAPGTSTEPSEGSAP

SEQ ID NO: 715 - protein, 36 aa, synthetic construct
  REGION 1..36: note = Description of Artificial Sequence: Synthetic polypeptide
GTSTEPSEGSAPGSPAGSPTSTEEGTSTEPSEGSAP

SEQ ID NO: 716 - protein, 36 aa, synthetic construct
  REGION 1..36: note = Description of Artificial Sequence: Synthetic polypeptide
GSEPATSGSETPGSPAGSPTSTEEGTSESATPESGP

SEQ ID NO: 717 - protein, 36 aa, synthetic construct; identical to SEQ ID NO: 707
  REGION 1..36: note = Description of Artificial Sequence: Synthetic polypeptide

SEQ ID NO: 718 - protein, 36 aa, synthetic construct
  REGION 1..36: note = Description of Artificial Sequence: Synthetic polypeptide
GTSTEPSEGSAPGSEPATSGSETPGSPAGSPTSTEE

SEQ ID NO: 719 - protein, 36 aa, synthetic construct
  REGION 1..36: note = Description of Artificial Sequence: Synthetic polypeptide
GSPAGSPTSTEEGTSESATPESGPGSEPATSGSETP

SEQ ID NO: 720 - protein, 36 aa, synthetic construct
  REGION 1..36: note = Description of Artificial Sequence: Synthetic polypeptide
GTSESATPESGPGSPAGSPTSTEEGSPAGSPTSTEE

SEQ ID NO: 721 - protein, 36 aa, synthetic construct
  REGION 1..36: note = Description of Artificial Sequence: Synthetic polypeptide
GTSTEPSEGSAPGTSESATPESGPGTSTEPSEGSAP

SEQ ID NO: 722 - protein, 36 aa, synthetic construct
  REGION 1..36: note = Description of Artificial Sequence: Synthetic polypeptide
GSPAGSPTSTEEGTSTEPSEGSAPGSEPATSGSETP

SEQ ID NO: 723 - protein, 36 aa, synthetic construct
  REGION 1..36: note = Description of Artificial Sequence: Synthetic polypeptide
GSPAGSPTSTEEGTSTEPSEGSAPGTSTEPSEGSAP

SEQ ID NO: 724 - protein, 36 aa, synthetic construct; identical to SEQ ID NO: 709
  REGION 1..36: note = Description of Artificial Sequence: Synthetic polypeptide

SEQ ID NO: 725 - protein, 36 aa, synthetic construct; identical to SEQ ID NO: 714
  REGION 1..36: note = Description of Artificial Sequence: Synthetic polypeptide

SEQ ID NO: 726 - protein, 36 aa, synthetic construct; identical to SEQ ID NO: 723
  REGION 1..36: note = Description of Artificial Sequence: Synthetic polypeptide

SEQ ID NO: 727 - protein, 36 aa, synthetic construct; identical to SEQ ID NO: 706
  REGION 1..36: note = Description of Artificial Sequence: Synthetic polypeptide

SEQ ID NO: 728 - protein, 36 aa, synthetic construct
  REGION 1..36: note = Description of Artificial Sequence: Synthetic polypeptide
GSEPATSGSETPGTSESATPESGPGTSTEPSEGSAP

SEQ ID NO: 729 - protein, 36 aa, synthetic construct; identical to SEQ ID NO: 715
  REGION 1..36: note = Description of Artificial Sequence: Synthetic polypeptide

SEQ ID NO: 730 - protein, 36 aa, synthetic construct
  REGION 1..36: note = Description of Artificial Sequence: Synthetic polypeptide
GSEPATSGSETPGTSESATPESGPGSEPATSGSETP

SEQ ID NO: 731 - protein, 36 aa, synthetic construct; identical to SEQ ID NO: 730
  REGION 1..36: note = Description of Artificial Sequence: Synthetic polypeptide

SEQ ID NO: 732 - protein, 36 aa, synthetic construct
  REGION 1..36: note = Description of Artificial Sequence: Synthetic polypeptide
GSEPATSGSETPGSEPATSGSETPGTSTEPSEGSAP

SEQ ID NO: 733 - protein, 36 aa, synthetic construct
  REGION 1..36: note = Description of Artificial Sequence: Synthetic polypeptide
GTSESATPESGPGSEPATSGSETPGSEPATSGSETP

SEQ ID NO: 734 - protein, 36 aa, synthetic construct
  REGION 1..36: note = Description of Artificial Sequence: Synthetic polypeptide
GTSTEPSEGSAPGTSTEPSEGSAPGTSESATPESGP

SEQ ID NO: 735 - protein, 36 aa, synthetic construct
  REGION 1..36: note = Description of Artificial Sequence: Synthetic polypeptide
GSEPATSGSETPGTSESATPESGPGTSESATPESGP

SEQ ID NO: 736 - protein, 36 aa, synthetic construct; identical to SEQ ID NO: 732
  REGION 1..36: note = Description of Artificial Sequence: Synthetic polypeptide

SEQ ID NO: 737 - protein, 36 aa, synthetic construct
  REGION 1..36: note = Description of Artificial Sequence: Synthetic polypeptide
GSEPATSGSETPGTSTEPSEGSAPGSEPATSGSETP

SEQ ID NO: 738 - protein, 36 aa, synthetic construct
  REGION 1..36: note = Description of Artificial Sequence: Synthetic polypeptide
GTSTEPSEGSAPGTSTEPSEGSAPGSEPATSGSETP

SEQ ID NO: 739 - protein, 36 aa, synthetic construct; identical to SEQ ID NO: 718
  REGION 1..36: note = Description of Artificial Sequence: Synthetic polypeptide

SEQ ID NO: 740 - protein, 36 aa, synthetic construct; identical to SEQ ID NO: 716
  REGION 1..36: note = Description of Artificial Sequence: Synthetic polypeptide

SEQ ID NO: 741 - protein, 36 aa, synthetic construct
  REGION 1..36: note = Description of Artificial Sequence: Synthetic polypeptide
GTSESATPESGPGSEPATSGSETPGTSESATPESGP

SEQ ID NO: 742 - DNA, 108 bp, synthetic construct
  misc_feature 1..108: note = Description of Artificial Sequence: Synthetic polynucleotide
  source 1..108: mol_type = other DNA
ggtagcccggcaggctctccgacctctactgaggaaggtacttctgaaagcgcaaccccggagtccggcccaggtacctctaccgaaccgtctgagggcagcgcacca

SEQ ID NO: 743 - DNA, 108 bp, synthetic construct
  misc_feature 1..108: note = Description of Artificial Sequence: Synthetic polynucleotide
  source 1..108: mol_type = other DNA
ggtacttctaccgaaccgtccgaaggcagcgctccaggtacctctactgaaccttccgagggcagcgctccaggtacctctaccgaaccttctgaaggtagcgcacca

SEQ ID NO: 744 - DNA, 108 bp, synthetic construct
  misc_feature 1..108: note = Description of Artificial Sequence: Synthetic polynucleotide
  source 1..108: mol_type = other DNA
ggtacctctaccgaaccgtctgaaggtagcgcaccaggtacctctgaaagcgcaactcctgagtccggtccaggtacttctgaaagcgcaaccccggagtctggccca

SEQ ID NO: 745 - DNA, 108 bp, synthetic construct
  misc_feature 1..108: note = Description of Artificial Sequence: Synthetic polynucleotide
  source 1..108: mol_type = other DNA
ggtacttctactgaaccgtctgaaggtagcgcaccaggtacttctgaaagcgcaaccccggaatccggcccaggtacctctgaaagcgcaaccccggagtccggccca

SEQ ID NO: 746 - DNA, 108 bp, synthetic construct
  misc_feature 1..108: note = Description of Artificial Sequence: Synthetic polynucleotide
  source 1..108: mol_type = other DNA
ggtagcgaaccggcaacctccggctctgaaaccccaggtacctctgaaagcgctactcctgaatccggcccaggtagcccggcaggttctccgacttccactgaggaa

SEQ ID NO: 747 - DNA, 108 bp, synthetic construct
  misc_feature 1..108: note = Description of Artificial Sequence: Synthetic polynucleotide
  source 1..108: mol_type = other DNA
ggtacttctgaaagcgcaacccctgaatccggtccaggtagcgaaccggctacttctggctctgagactccaggtacttctaccgaaccgtccgaaggtagcgcacca

SEQ ID NO: 748 - DNA, 108 bp, synthetic construct
  misc_feature 1..108: note = Description of Artificial Sequence: Synthetic polynucleotide
  source 1..108: mol_type = other DNA
ggtagcccggctggctctccaacctccactgaggaaggtagcccggctggctctccaacctccactgaagaaggtagcgaaccggctacctccggctctgaaactcca

SEQ ID NO: 749 - DNA, 108 bp, synthetic construct
  misc_feature 1..108: note = Description of Artificial Sequence: Synthetic polynucleotide
  source 1..108: mol_type = other DNA
ggtagcccggctggctctcctacctctactgaggaaggtacttctgaaagcgctactcctgagtctggtccaggtacctctactgaaccgtccgaaggtagcgctcca

SEQ ID NO: 750 - DNA, 108 bp, synthetic construct
  misc_feature 1..108: note = Description of Artificial Sequence: Synthetic polynucleotide
  source 1..108: mol_type = other DNA
ggtagccctgctggctctccgacttctactgaggaaggtagcccggctggttctccgacttctactgaggaaggtacttctaccgaaccttccgaaggtagcgctcca

SEQ ID NO: 751 - DNA, 108 bp, synthetic construct
  misc_feature 1..108: note = Description of Artificial Sequence: Synthetic polynucleotide
  source 1..108: mol_type = other DNA
ggtacttctgaaagcgctactccggagtccggtccaggtacctctaccgaaccgtccgaaggcagcgctccaggtacttctactgaaccttctgagggtagcgctcca

SEQ ID NO: 752 - DNA, 108 bp, synthetic construct
  misc_feature 1..108: note = Description of Artificial Sequence: Synthetic polynucleotide
  source 1..108: mol_type = other DNA
ggtacctctaccgaaccttccgaaggtagcgctccaggtagcccggcaggttctcctacttccactgaggaaggtacttctaccgaaccttctgagggtagcgcacca

SEQ ID NO: 753 - DNA, 108 bp, synthetic construct
  misc_feature 1..108: note = Description of Artificial Sequence: Synthetic polynucleotide
  source 1..108: mol_type = other DNA
ggtagcgaaccggctacttccggctctgagactccaggtagccctgctggctctccgacctctaccgaagaaggtacctctgaaagcgctacccctgagtctggccca

SEQ ID NO: 754 - DNA, 108 bp, synthetic construct
  misc_feature 1..108: note = Description of Artificial Sequence: Synthetic polynucleotide
  source 1..108: mol_type = other DNA
ggtacttctaccgaaccttccgagggcagcgcaccaggtacttctgaaagcgctacccctgagtccggcccaggtacttctgaaagcgctactcctgaatccggtcca

SEQ ID NO: 755 - DNA, 108 bp, synthetic construct
  misc_feature 1..108: note = Description of Artificial Sequence: Synthetic polynucleotide
  source 1..108: mol_type = other DNA
ggtacttctactgaaccgtctgaaggcagcgcaccaggtagcgaaccggctacttccggttctgaaaccccaggtagcccagcaggttctccaacttctactgaagaa

SEQ ID NO: 756 - DNA, 108 bp, synthetic construct
  misc_feature 1..108: note = Description of Artificial Sequence: Synthetic polynucleotide
  source 1..108: mol_type = other DNA
ggtagccctgctggctctccaacctccaccgaagaaggtacctctgaaagcgcaacccctgaatccggcccaggtagcgaaccggcaacctccggttctgaaacccca

SEQ ID NO: 757 - DNA, 108 bp, synthetic construct
  misc_feature 1..108: note = Description of Artificial Sequence: Synthetic polynucleotide
  source 1..108: mol_type = other DNA
ggtacttctgaaagcgctactcctgagtccggcccaggtagcccggctggctctccgacttccaccgaggaaggtagcccggctggctctccaacttctactgaagaa

SEQ ID NO: 758 - DNA, 108 bp, synthetic construct
  misc_feature 1..108: note = Description of Artificial Sequence: Synthetic polynucleotide
  source 1..108: mol_type = other DNA
ggtacctctactgaaccttctgagggcagcgctccaggtacttctgaaagcgctaccccggagtccggtccaggtacttctactgaaccgtccgaaggtagcgcacca

SEQ ID NO: 759 - DNA, 108 bp, synthetic construct
  misc_feature 1..108: note = Description of Artificial Sequence: Synthetic polynucleotide
  source 1..108: mol_type = other DNA
ggtagcccggcaggctctccgacttccaccgaggaaggtacctctactgaaccttctgagggtagcgctccaggtagcgaaccggcaacctctggctctgaaacccca

SEQ ID NO: 760 - DNA, 108 bp, synthetic construct
  misc_feature 1..108: note = Description of Artificial Sequence: Synthetic polynucleotide
  source 1..108: mol_type = other DNA
ggtagcccagcaggctctccgacttccactgaggaaggtacttctactgaaccttccgaaggcagcgcaccaggtacctctactgaaccttctgagggcagcgctcca

SEQ ID NO: 761 - DNA, 108 bp, synthetic construct
  misc_feature 1..108: note = Description of Artificial Sequence: Synthetic polynucleotide
  source 1..108: mol_type = other DNA
ggtagcgaacctgctacctccggttctgaaaccccaggtacctctgaaagcgcaactccggagtctggtccaggtagccctgcaggttctcctacctccactgaggaa

SEQ ID NO: 762 - DNA, 108 bp, synthetic construct
  misc_feature 1..108: note = Description of Artificial Sequence: Synthetic polynucleotide
  source 1..108: mol_type = other DNA
ggtacctctgaaagcgctactccggagtctggcccaggtacctctactgaaccgtctgagggtagcgctccaggtacttctactgaaccgtccgaaggtagcgcacca

SEQ ID NO: 763 - DNA, 108 bp, synthetic construct
  misc_feature 1..108: note = Description of Artificial Sequence: Synthetic polynucleotide
  source 1..108: mol_type = other DNA
ggtagcccggctggttctccgacttccaccgaggaaggtacctctactgaaccttctgagggtagcgctccaggtacctctactgaaccttccgaaggcagcgctcca

SEQ ID NO: 764 - DNA, 108 bp, synthetic construct
  misc_feature 1..108: note = Description of Artificial Sequence: Synthetic polynucleotide
  source 1..108: mol_type = other DNA
ggtacttctaccgaaccgtccgagggcagcgctccaggtacttctactgaaccttctgaaggcagcgctccaggtacttctactgaaccttccgaaggtagcgcacca

SEQ ID NO: 765 - DNA, 108 bp, synthetic construct
  misc_feature 1..108: note = Description of Artificial Sequence: Synthetic polynucleotide
  source 1..108: mol_type = other DNA
ggtagcgaacctgcaacctctggctctgaaaccccaggtacctctgaaagcgctactcctgaatctggcccaggtacttctactgaaccgtccgagggcagcgcacca

SEQ ID NO: 766 - DNA, 108 bp, synthetic construct
  misc_feature 1..108: note = Description of Artificial Sequence: Synthetic polynucleotide
  source 1..108: mol_type = other DNA
ggtacttctaccgaaccgtccgagggtagcgcaccaggtagcccagcaggttctcctacctccaccgaggaaggtacttctaccgaaccgtccgagggtagcgcacca

SEQ ID NO: 767 - DNA, 108 bp, synthetic construct
  misc_feature 1..108: note = Description of Artificial Sequence: Synthetic polynucleotide
  source 1..108: mol_type = other DNA
ggtagcgaaccggcaacctccggctctgaaactccaggtacttctgaaagcgctactccggaatccggcccaggtagcgaaccggctacttccggctctgaaacccca

SEQ ID NO: 768 - DNA, 108 bp, synthetic construct
  misc_feature 1..108: note = Description of Artificial Sequence: Synthetic polynucleotide
  source 1..108: mol_type = other DNA
ggtagcgaaccggcaacttccggctctgaaaccccaggtacttctgaaagcgctactcctgagtctggcccaggtagcgaacctgctacctctggctctgaaacccca

SEQ ID NO: 769 - DNA, 108 bp, synthetic construct
  misc_feature 1..108: note = Description of Artificial Sequence: Synthetic polynucleotide
  source 1..108: mol_type = other DNA
ggtagcgaaccggcaacctctggctctgaaactccaggtagcgaacctgcaacctccggctctgaaaccccaggtacttctactgaaccttctgagggcagcgcacca

SEQ ID NO: 770 - DNA, 108 bp, synthetic construct
  misc_feature 1..108: note = Description of Artificial Sequence: Synthetic polynucleotide
  source 1..108: mol_type = other DNA
ggtacttctgaaagcgctaccccggaatctggcccaggtagcgaaccggctacttctggttctgaaaccccaggtagcgaaccggctacctccggttctgaaactcca

SEQ ID NO: 771 - DNA, 108 bp, synthetic construct
  misc_feature 1..108: note = Description of Artificial Sequence: Synthetic polynucleotide
  source 1..108: mol_type = other DNA
ggtacctctactgaaccttccgaaggcagcgctccaggtacctctaccgaaccgtccgagggcagcgcaccaggtacttctgaaagcgcaacccctgaatccggtcca

SEQ ID NO: 772 - DNA, 108 bp, synthetic construct
  misc_feature 1..108: note = Description of Artificial Sequence: Synthetic polynucleotide
  source 1..108: mol_type = other DNA
ggtagcgaaccggcaacctctggctctgaaaccccaggtacctctgaaagcgctactccggaatctggtccaggtacttctgaaagcgctactccggaatccggtcca

SEQ ID NO: 773 - DNA, 108 bp, synthetic construct
  misc_feature 1..108: note = Description of Artificial Sequence: Synthetic polynucleotide
  source 1..108: mol_type = other DNA
ggtagcgaacctgctacctccggctctgaaactccaggtagcgaaccggctacttccggttctgaaactccaggtacctctaccgaaccttccgaaggcagcgcacca

SEQ ID NO: 774 - DNA, 108 bp, synthetic construct
  misc_feature 1..108: note = Description of Artificial Sequence: Synthetic polynucleotide
  source 1..108: mol_type = other DNA
ggtagcgaacctgctacttctggttctgaaactccaggtacttctaccgaaccgtccgagggtagcgctccaggtagcgaacctgctacttctggttctgaaactcca

SEQ ID NO: 775 - DNA, 108 bp, synthetic construct
  misc_feature 1..108: note = Description of Artificial Sequence: Synthetic polynucleotide
  source 1..108: mol_type = other DNA
ggtacctctaccgaaccgtccgagggtagcgcaccaggtacctctactgaaccgtctgagggtagcgctccaggtagcgaaccggcaacctccggttctgaaactcca

SEQ ID NO: 776 - DNA, 108 bp, synthetic construct
  misc_feature 1..108: note = Description of Artificial Sequence: Synthetic polynucleotide
  source 1..108: mol_type = other DNA
ggtacttctactgaaccttccgaaggtagcgctccaggtagcgaacctgctacttctggttctgaaaccccaggtagcccggctggctctccgacctccaccgaggaa

SEQ ID NO: 777 - DNA, 108 bp, synthetic construct
  misc_feature 1..108: note = Description of Artificial Sequence: Synthetic polynucleotide
  source 1..108: mol_type = other DNA
ggtagcgaaccggctacttccggctctgagactccaggtagcccagctggttctccaacctctactgaggaaggtacttctgaaagcgctacccctgaatctggtcca

SEQ ID NO: 778 - DNA, 108 bp, synthetic construct
  misc_feature 1..108: note = Description of Artificial Sequence: Synthetic polynucleotide
  source 1..108: mol_type = other DNA
ggtacctctgaaagcgcaactcctgagtctggcccaggtagcgaacctgctacctccggctctgagactccaggtacctctgaaagcgcaaccccggaatctggtcca

SEQ ID NO: 779 - DNA, 36 bp, synthetic construct
  misc_feature 1..36: note = Description of Artificial Sequence: Synthetic oligonucleotide
  source 1..36: mol_type = other DNA
aggttctacyagcgaatcyccktctggyacygcwcc

SEQ ID NO: 780 - DNA, 36 bp, synthetic construct
  misc_feature 1..36: note = Description of Artificial Sequence: Synthetic oligonucleotide
  source 1..36: mol_type = other DNA
acctggwgcrgtrccagamggrgattcgctrgtaga

SEQ ID NO: 781 - DNA, 36 bp, synthetic construct
  misc_feature 1..36: note = Description of Artificial Sequence: Synthetic oligonucleotide
  source 1..36: mol_type = other DNA
aggtacytctacycckgaaagcggytcygcwtctcc

SEQ ID NO: 782 - DNA, 36 bp, synthetic construct
  misc_feature 1..36: note = Description of Artificial Sequence: Synthetic oligonucleotide
  source 1..36: mol_type = other DNA
acctggagawgcrgarccgctttcmggrgtagargt

SEQ ID NO: 783 - DNA, 36 bp, synthetic construct
  misc_feature 1..36: note = Description of Artificial Sequence: Synthetic oligonucleotide
  source 1..36: mol_type = other DNA
aggtacytcycckagcggygaatcttctacygcwcc

SEQ ID NO: 784 - DNA, 36 bp, synthetic construct
  misc_feature 1..36: note = Description of Artificial Sequence: Synthetic oligonucleotide
  source 1..36: mol_type = other DNA
acctggwgcrgtagaagattcrccgctmggrgargt

SEQ ID NO: 785 - DNA, 36 bp, synthetic construct
  misc_feature 1..36: note = Description of Artificial Sequence: Synthetic oligonucleotide
  source 1..36: mol_type = other DNA
aggttcyacyagctctacygcwgaatctcckggycc

SEQ ID NO: 786 - DNA, 36 bp, synthetic construct
  misc_feature 1..36: note = Description of Artificial Sequence: Synthetic oligonucleotide
  source 1..36: mol_type = other DNA
acctggrccmggagattcwgcrgtagagctrgtrga

SEQ ID NO: 787 - protein, 36 aa, synthetic construct
  REGION 1..36: note = Description of Artificial Sequence: Synthetic polypeptide
GTSTPESGSASPGTSPSGESSTAPGTSPSGESSTAP

SEQ ID NO: 788 - protein, 36 aa, synthetic construct
  REGION 1..36: note = Description of Artificial Sequence: Synthetic polypeptide
GTSPSGESSTAPGSTSSTAESPGPGTSPSGESSTAP

SEQ ID NO: 789 - protein, 36 aa, synthetic construct
  REGION 1..36: note = Description of Artificial Sequence: Synthetic polypeptide
GSTSSTAESPGPGTSPSGESSTAPGTSTPESGSASP

SEQ ID NO: 790 - protein, 36 aa, synthetic construct
  REGION 1..36: note = Description of Artificial Sequence: Synthetic polypeptide
GSTSSTAESPGPGSTSSTAESPGPGTSPSGESSTAP

SEQ ID NO: 791 - protein, 36 aa, synthetic construct; identical to SEQ ID NO: 789
  REGION 1..36: note = Description of Artificial Sequence: Synthetic polypeptide

SEQ ID NO: 792 - protein, 36 aa, synthetic construct
  REGION 1..36: note = Description of Artificial Sequence: Synthetic polypeptide
GSTSSTAESPGPGTSTPESGSASPGSTSESPSGTAP

SEQ ID NO: 793 - protein, 36 aa, synthetic construct
  REGION 1..36: note = Description of Artificial Sequence: Synthetic polypeptide
GSTSSTAESPGPGTSTPESGSASPGTSTPESGSASP

SEQ ID NO: 794 - protein, 36 aa, synthetic construct
  REGION 1..36: note = Description of Artificial Sequence: Synthetic polypeptide
GSTSESPSGTAPGTSPSGESSTAPGSTSESPSGTAP

SEQ ID NO: 795 - protein, 36 aa, synthetic construct; identical to SEQ ID NO: 790
  REGION 1..36: note = Description of Artificial Sequence: Synthetic polypeptide

SEQ ID NO: 796 - protein, 36 aa, synthetic construct; identical to SEQ ID NO: 792
  REGION 1..36: note = Description of Artificial Sequence: Synthetic polypeptide

SEQ ID NO: 797 - protein, 36 aa, synthetic construct; identical to SEQ ID NO: 790
  REGION 1..36: note = Description of Artificial Sequence: Synthetic polypeptide

SEQ ID NO: 798 - protein, 36 aa, synthetic construct
  REGION 1..36: note = Description of Artificial Sequence: Synthetic polypeptide
GSTSSTAESPGPGSTSESPSGTAPGSTSSTAESPGP

SEQ ID NO: 799 - protein, 36 aa, synthetic construct
  REGION 1..36: note = Description of Artificial Sequence: Synthetic polypeptide
GSTSSTAESPGPGSTSSTAESPGPGSTSSTAESPGP

SEQ ID NO: 800 - protein, 36 aa, synthetic construct
  REGION 1..36: note = Description of Artificial Sequence: Synthetic polypeptide
GSTSESPSGTAPGSTSSTAESPGPGSTSSTAESPGP

SEQ ID NO: 801 - protein, 36 aa, synthetic construct
  REGION 1..36: note = Description of Artificial Sequence: Synthetic polypeptide
GSTSESPSGTAPGSTSESPSGTAPGSTSESPSGTAP

SEQ ID NO: 802 - protein, 36 aa, synthetic construct; identical to SEQ ID NO: 799
  REGION 1..36: note = Description of Artificial Sequence: Synthetic polypeptide

SEQ ID NO: 803 - protein, 36 aa, synthetic construct; identical to SEQ ID NO: 790
  REGION 1..36: note = Description of Artificial Sequence: Synthetic polypeptide

SEQ ID NO: 804 - protein, 36 aa, synthetic construct
  REGION 1..36: note = Description of Artificial Sequence: Synthetic polypeptide
GSSPSASTGTGPGSSTPSGATGSPGSSTPSGATGSP

SEQ ID NO: 805 - protein, 36 aa, synthetic construct
  REGION 1..36: note = Description of Artificial Sequence: Synthetic polypeptide
GTSPSGESSTAPGTSTPESGSASPGSTSSTAESPGP

SEQ ID NO: 806 - protein, 36 aa, synthetic construct
  REGION 1..36: note = Description of Artificial Sequence: Synthetic polypeptide
GSTSSTAESPGPGSTSSTAESPGPGTSTPESGSASP

SEQ ID NO: 807 - protein, 36 aa, synthetic construct
  REGION 1..36: note = Description of Artificial Sequence: Synthetic polypeptide
GTSPSGESSTAPGSTSSTAESPGPGTSTPESGSASP

SEQ ID NO: 808 - protein, 36 aa, synthetic construct; identical to SEQ ID NO: 800
  REGION 1..36: note = Description of Artificial Sequence: Synthetic polypeptide

SEQ ID NO: 809 - protein, 36 aa, synthetic construct; identical to SEQ ID NO: 798
  REGION 1..36: note = Description of Artificial Sequence: Synthetic polypeptide

SEQ ID NO: 810 - protein, 36 aa, synthetic construct; identical to SEQ ID NO: 789
  REGION 1..36: note = Description of Artificial Sequence: Synthetic polypeptide

SEQ ID NO: 811 - protein, 36 aa, synthetic construct
  REGION 1..36: note = Description of Artificial Sequence: Synthetic polypeptide
GSTSESPSGTAPGSTSESPSGTAPGTSPSGESSTAP

SEQ ID NO: 812 - protein, 36 aa, synthetic construct
  REGION 1..36: note = Description of Artificial Sequence: Synthetic polypeptide
GSTSESPSGTAPGSTSESPSGTAPGTSTPESGSASP

SEQ ID NO: 813 - protein, 36 aa, synthetic construct
  REGION 1..36: note = Description of Artificial Sequence: Synthetic polypeptide
GTSTPESGSASPGSTSSTAESPGPGSTSSTAESPGP

SEQ ID NO: 814 - protein, 36 aa, synthetic construct; identical to SEQ ID NO: 811
  REGION 1..36: note = Description of Artificial Sequence: Synthetic polypeptide

SEQ ID NO: 815 - protein, 36 aa, synthetic construct
  REGION 1..36: note = Description of Artificial Sequence: Synthetic polypeptide
GSTSSTAESPGPGSTSSTAESPGPGSTSESPSGTAP

SEQ ID NO: 816 - protein, 36 aa, synthetic construct; identical to SEQ ID NO: 806
  REGION 1..36: note = Description of Artificial Sequence: Synthetic polypeptide

SEQ ID NO: 817 - protein, 36 aa, synthetic construct; identical to SEQ ID NO: 815
  REGION 1..36: note = Description of Artificial Sequence: Synthetic polypeptide

SEQ ID NO: 818 - protein, 36 aa, synthetic construct
  REGION 1..36: note = Description of Artificial Sequence: Synthetic polypeptide
GTSPSGESSTAPGSTSESPSGTAPGSTSSTAESPGP

SEQ ID NO: 819 - protein, 36 aa, synthetic construct
  REGION 1..36: note = Description of Artificial Sequence: Synthetic polypeptide
GSTSESPSGTAPGTSPSGESSTAPGSTSSTAESPGP

SEQ ID NO: 820 - protein, 36 aa, synthetic construct
  REGION 1..36: note = Description of Artificial Sequence: Synthetic polypeptide
GSTSSTAESPGPGSTSESPSGTAPGTSPSGESSTAP

SEQ ID NO: 821 - protein, 36 aa, synthetic construct; identical to SEQ ID NO: 812
  REGION 1..36: note = Description of Artificial Sequence: Synthetic polypeptide

SEQ ID NO: 822 - protein, 36 aa, synthetic construct
  REGION 1..36: note = Description of Artificial Sequence: Synthetic polypeptide
GTSTPESGSASPGSTSESPSGTAPGSTSSTAESPGP

SEQ ID NO: 823 - protein, 36 aa, synthetic construct
  REGION 1..36: note = Description of Artificial Sequence: Synthetic polypeptide
GSTSSTAESPGPGTSPSGESSTAPGTSPSGESSTAP

SEQ ID NO: 824 - protein, 36 aa, synthetic construct
  REGION 1..36: note = Description of Artificial Sequence: Synthetic polypeptide
GTSPSGESSTAPGTSPSGESSTAPGTSPSGESSTAP

SEQ ID NO: 825 - protein, 36 aa, synthetic construct; identical to SEQ ID NO: 792
  REGION 1..36: note = Description of Artificial Sequence: Synthetic polypeptide

SEQ ID NO: 826 - protein, 36 aa, synthetic construct
  REGION 1..36: note = Description of Artificial Sequence: Synthetic polypeptide
GSTSESPSGTAPGTSPSGESSTAPGTSPSGESSTAP

SEQ ID NO: 827 - protein, 36 aa, synthetic construct
  REGION 1..36: note = Description of Artificial Sequence: Synthetic polypeptide
GSTSESPSGTAPGTSTPESGSASPGSTSSTAESPGP

SEQ ID NO: 828 - protein, 36 aa, synthetic construct; identical to SEQ ID NO: 815
  REGION 1..36: note = Description of Artificial Sequence: Synthetic polypeptide

SEQ ID NO: 829 - protein, 36 aa, synthetic construct
  REGION 1..36: note = Description of Artificial Sequence: Synthetic polypeptide
GSTSESPSGTAPGTSTPESGSASPGTSTPESGSASP

SEQ ID NO: 830 - protein, 36 aa, synthetic construct; identical to SEQ ID NO: 829
  REGION 1..36: note = Description of Artificial Sequence: Synthetic polypeptide

SEQ ID NO: 831 - DNA, 108 bp, synthetic construct
  misc_feature 1..108: note = Description of Artificial Sequence: Synthetic polynucleotide
  source 1..108: mol_type = other DNA
ggtacttctactccggaaagcggttccgcatctccaggtacttctcctagcggtgaatcttctactgctccaggtacctctcctagcggcgaatcttctactgctcca

SEQ ID NO: 832 - DNA, 108 bp, synthetic construct
  misc_feature 1..108: note = Description of Artificial Sequence: Synthetic polynucleotide
  source 1..108: mol_type = other DNA
ggtacttctccgagcggtgaatcttctaccgcaccaggttctactagctctaccgctgaatctccgggcccaggtacttctccgagcggtgaatcttctactgctcca

SEQ ID NO: 833 - DNA, 108 bp, synthetic construct
  misc_feature 1..108: note = Description of Artificial Sequence: Synthetic polynucleotide
  source 1..108: mol_type = other DNA
ggttccaccagctctactgctgaatctcctggtccaggtacctctcctagcggtgaatcttctactgctccaggtacttctactcctgaaagcggctctgcttctcca

SEQ ID NO: 834 - DNA, 108 bp, synthetic construct
  misc_feature 1..108: note = Description of Artificial Sequence: Synthetic polynucleotide
  source 1..108: mol_type = other DNA
ggttctaccagctctactgcagaatctcctggcccaggttccaccagctctaccgcagaatctccgggtccaggtacttcccctagcggtgaatcttctaccgcacca

SEQ ID NO: 835 - DNA, 108 bp, synthetic construct
  misc_feature 1..108: note = Description of Artificial Sequence: Synthetic polynucleotide
  source 1..108: mol_type = other DNA
ggttctactagctctactgctgaatctcctggcccaggtacttctcctagcggtgaatcttctaccgctccaggtacctctactccggaaagcggttctgcatctcca

SEQ ID NO: 836 - DNA, 108 bp, synthetic construct
  misc_feature 1..108: note = Description of Artificial Sequence: Synthetic polynucleotide
  source 1..108: mol_type = other DNA
ggttctaccagctctaccgcagaatctcctggtccaggtacctctactccggaaagcggctctgcatctccaggttctactagcgaatctccttctggcactgcacca

SEQ ID NO: 837 - DNA, 108 bp, synthetic construct
  misc_feature 1..108: note = Description of Artificial Sequence: Synthetic polynucleotide
  source 1..108: mol_type = other DNA
ggttctactagctctactgcagaatctcctggcccaggtacctctactccggaaagcggctctgcatctccaggtacttctacccctgaaagcggttctgcatctcca

SEQ ID NO: 838 - DNA, 108 bp, synthetic construct
  misc_feature 1..108: note = Description of Artificial Sequence: Synthetic polynucleotide
  source 1..108: mol_type = other DNA
ggttctaccagcgaatctccttctggcaccgctccaggtacctctcctagcggcgaatcttctaccgctccaggttctactagcgaatctccttctggcactgcacca

SEQ ID NO: 839 - DNA, 108 bp, synthetic construct
  misc_feature 1..108: note = Description of Artificial Sequence: Synthetic polynucleotide
  source 1..108: mol_type = other DNA
ggttccaccagctctactgcagaatctccgggcccaggttctactagctctactgcagaatctccgggtccaggtacttctcctagcggcgaatcttctaccgctcca

SEQ ID NO: 840 - DNA, 108 bp, synthetic construct
  misc_feature 1..108: note = Description of Artificial Sequence: Synthetic polynucleotide
  source 1..108: mol_type = other DNA
ggttccactagctctactgcagaatctcctggcccaggtacctctacccctgaaagcggctctgcatctccaggttctaccagcgaatccccgtctggcaccgcacca

SEQ ID NO: 841 - DNA, 108 bp, synthetic construct
  misc_feature 1..108: note = Description of Artificial Sequence: Synthetic polynucleotide
  source 1..108: mol_type = other DNA
ggttctactagctctactgctgaatctccgggtccaggttctaccagctctactgctgaatctcctggtccaggtacctccccgagcggtgaatcttctactgcacca

SEQ ID NO: 842 - DNA, 108 bp, synthetic construct
  misc_feature 1..108: note = Description of Artificial Sequence: Synthetic polynucleotide
  source 1..108: mol_type = other DNA
ggttctaccagctctaccgctgaatctcctggcccaggttctaccagcgaatccccgtctggcaccgcaccaggttctactagctctaccgctgaatctccgggtcca

SEQ ID NO: 843 - DNA, 108 bp, synthetic construct
  misc_feature 1..108: note = Description of Artificial Sequence: Synthetic polynucleotide
  source 1..108: mol_type = other DNA
ggttctaccagctctaccgcagaatctcctggcccaggttccactagctctaccgctgaatctcctggtccaggttctactagctctaccgctgaatctcctggtcca

SEQ ID NO: 844 - DNA, 108 bp, synthetic construct
  misc_feature 1..108: note = Description of Artificial Sequence: Synthetic polynucleotide
  source 1..108: mol_type = other DNA
ggttctactagcgaatccccttctggtactgctccaggttccactagctctaccgctgaatctcctggcccaggttccactagctctactgcagaatctcctggtcca

SEQ ID NO: 845 - DNA, 108 bp, synthetic construct
  misc_feature 1..108: note = Description of Artificial Sequence: Synthetic polynucleotide
  source 1..108: mol_type = other DNA
ggttctactagcgaatctccttctggtaccgctccaggttctaccagcgaatccccgtctggtactgctccaggttctaccagcgaatctccttctggtactgcacca

SEQ ID NO: 846 - DNA, 108 bp, synthetic construct
  misc_feature 1..108: note = Description of Artificial Sequence: Synthetic polynucleotide
  source 1..108: mol_type = other DNA
ggttccaccagctctactgctgaatctcctggcccaggttctaccagctctactgctgaatctccgggcccaggttccaccagctctaccgctgaatctccgggtcca

SEQ ID NO: 847 - DNA, 108 bp, synthetic construct
  misc_feature 1..108: note = Description of Artificial Sequence: Synthetic polynucleotide
  source 1..108: mol_type = other DNA
ggttccactagctctaccgcagaatctcctggtccaggttctactagctctactgctgaatctccgggtccaggtacctcccctagcggcgaatcttctaccgctcca

SEQ ID NO: 848 - DNA, 108 bp, synthetic construct
  misc_feature 1..108: note = Description of Artificial Sequence: Synthetic polynucleotide
  source 1..108: mol_type = other DNA
ggttctagcccttctgcttccaccggtaccggcccaggtagctctactccgtctggtgcaactggctctccaggtagctctactccgtctggtgcaaccggctcccca

SEQ ID NO: 849 - DNA, 108 bp, synthetic construct
  misc_feature 1..108: note = Description of Artificial Sequence: Synthetic polynucleotide
  source 1..108: mol_type = other DNA
ggtacttcccctagcggtgaatcttctactgctccaggtacctctactccggaaagcggctccgcatctccaggttctactagctctactgctgaatctcctggtcca

SEQ ID NO: 850 - DNA, 108 bp, synthetic construct
  misc_feature 1..108: note = Description of Artificial Sequence: Synthetic polynucleotide
  source 1..108: mol_type = other DNA
ggttctactagctctaccgctgaatctccgggtccaggttctaccagctctactgcagaatctcctggcccaggtacttctactccggaaagcggttccgcttctcca

SEQ ID NO: 851 - DNA, 108 bp, synthetic construct
  misc_feature 1..108: note = Description of Artificial Sequence: Synthetic polynucleotide
  source 1..108: mol_type = other DNA
ggtacttctcctagcggtgaatcttctaccgctccaggttctaccagctctactgctgaatctcctggcccaggtacttctaccccggaaagcggctccgcttctcca

SEQ ID NO: 852 - DNA, 108 bp, synthetic construct
  misc_feature 1..108: note = Description of Artificial Sequence: Synthetic polynucleotide
  source 1..108: mol_type = other DNA
ggttctactagcgaatccccttctggtactgcaccaggttctaccagctctactgctgaatctccgggcccaggttccaccagctctaccgcagaatctcctggtcca

SEQ ID NO: 853 - DNA, 108 bp, synthetic construct
  misc_feature 1..108: note = Description of Artificial Sequence: Synthetic polynucleotide
  source 1..108: mol_type = other DNA
ggttccaccagctctaccgctgaatctccgggcccaggttctaccagcgaatccccttctggcactgcaccaggttctactagctctaccgcagaatctccgggccca

SEQ ID NO: 854 - DNA, 108 bp, synthetic construct
  misc_feature 1..108: note = Description of Artificial Sequence: Synthetic polynucleotide
  source 1..108: mol_type = other DNA
ggttctaccagctctactgctgaatctccgggtccaggtacttccccgagcggtgaatcttctactgcaccaggtacttctactccggaaagcggttccgcttctcca

SEQ ID NO: 855 - DNA, 108 bp, synthetic construct
  misc_feature 1..108: note = Description of Artificial Sequence: Synthetic polynucleotide
  source 1..108: mol_type = other DNA
ggttctaccagcgaatctccttctggcaccgctccaggttctactagcgaatccccgtctggtaccgcaccaggtacttctcctagcggcgaatcttctaccgcacca

SEQ ID NO: 856 - DNA, 108 bp, synthetic construct
  misc_feature 1..108: note = Description of Artificial Sequence: Synthetic polynucleotide
  source 1..108: mol_type = other DNA
ggttctaccagcgaatccccttctggtactgctccaggttctaccagcgaatccccttctggcaccgcaccaggtacttctacccctgaaagcggctccgcttctcca

SEQ ID NO: 857 - DNA, 108 bp, synthetic construct
  misc_feature 1..108: note = Description of Artificial Sequence: Synthetic polynucleotide
  source 1..108: mol_type = other DNA
ggtacctctactcctgaaagcggttctgcatctccaggttccactagctctaccgcagaatctccgggcccaggttctactagctctactgctgaatctcctggccca

SEQ ID NO: 858 - DNA, 108 bp, synthetic construct
  misc_feature 1..108: note = Description of Artificial Sequence: Synthetic polynucleotide
  source 1..108: mol_type = other DNA
ggttctaccagcgaatccccttctggcactgcaccaggttctactagcgaatccccttctggtaccgcaccaggtacttctccgagcggcgaatcttctactgctcca

SEQ ID NO: 859 - DNA, 108 bp, synthetic construct
  misc_feature 1..108: note = Description of Artificial Sequence: Synthetic polynucleotide
  source 1..108: mol_type = other DNA
ggttctactagctctaccgctgaatctcctggcccaggttccactagctctaccgcagaatctccgggcccaggttctactagcgaatccccttctggtaccgctcca

SEQ ID NO: 860 - DNA, 108 bp, synthetic construct
  misc_feature 1..108: note = Description of Artificial Sequence: Synthetic polynucleotide
  source 1..108: mol_type = other DNA
ggttccaccagctctactgcagaatctcctggcccaggttctactagctctaccgcagaatctcctggtccaggtacctctactcctgaaagcggttccgcatctcca

SEQ ID NO: 861 - DNA, 108 bp, synthetic construct
  misc_feature 1..108: note = Description of Artificial Sequence: Synthetic polynucleotide
  source 1..108: mol_type = other DNA
ggttctactagctctactgctgaatctccgggcccaggttctactagctctaccgctgaatctccgggtccaggttctactagcgaatctccttctggtaccgctcca

SEQ ID NO: 862 - DNA, 108 bp, synthetic construct
  misc_feature 1..108: note = Description of Artificial Sequence: Synthetic polynucleotide
  source 1..108: mol_type = other DNA
ggtacctccccgagcggtgaatcttctactgcaccaggttctactagcgaatccccttctggtactgctccaggttccaccagctctactgcagaatctccgggtcca

SEQ ID NO: 863 - DNA, 108 bp, synthetic construct
  misc_feature 1..108: note = Description of Artificial Sequence: Synthetic polynucleotide
  source 1..108: mol_type = other DNA
ggttctactagcgaatccccgtctggtactgctccaggtacttcccctagcggtgaatcttctactgctccaggttctaccagctctaccgcagaatctccgggtcca

SEQ ID NO: 864 - DNA, 108 bp, synthetic construct
  misc_feature 1..108: note = Description of Artificial Sequence: Synthetic polynucleotide
  source 1..108: mol_type = other DNA
ggttctaccagctctaccgctgaatctcctggcccaggttctactagcgaatctccgtctggcaccgcaccaggtacttcccctagcggtgaatcttctactgcacca

SEQ ID NO: 865 - DNA, 108 bp, synthetic construct
  misc_feature 1..108: note = Description of Artificial Sequence: Synthetic polynucleotide
  source 1..108: mol_type = other DNA
ggttctactagcgaatctccttctggcactgcaccaggttctaccagcgaatctccgtctggcactgcaccaggtacctctacccctgaaagcggttccgcttctcca

SEQ ID NO: 866 - DNA, 108 bp, synthetic construct
  misc_feature 1..108: note = Description of Artificial Sequence: Synthetic polynucleotide
  source 1..108: mol_type = other DNA
ggtacctctactccggaaagcggttccgcatctccaggttctaccagcgaatccccgtctggcaccgcaccaggttctactagctctactgctgaatctccgggccca

SEQ ID NO: 867 - DNA, 108 bp, synthetic construct
  misc_feature 1..108: note = Description of Artificial Sequence: Synthetic polynucleotide
  source 1..108: mol_type = other DNA
ggttctactagctctactgcagaatctccgggcccaggtacctctcctagcggtgaatcttctaccgctccaggtacttctccgagcggtgaatcttctaccgctcca

SEQ ID NO: 868 - DNA, 108 bp, synthetic construct
  misc_feature 1..108: note = Description of Artificial Sequence: Synthetic polynucleotide
  source 1..108: mol_type = other DNA
ggtacctcccctagcggcgaatcttctactgctccaggtacctctcctagcggcgaatcttctaccgctccaggtacctcccctagcggtgaatcttctaccgcacca

SEQ ID NO: 869 - DNA, 108 bp, synthetic construct
  misc_feature 1..108: note = Description of Artificial Sequence: Synthetic polynucleotide
  source 1..108: mol_type = other DNA
ggttccactagctctactgctgaatctcctggcccaggtacttctactccggaaagcggttccgcttctccaggttctactagcgaatctccgtctggcaccgcacca

SEQ ID NO: 870 - DNA, 108 bp, synthetic construct
  misc_feature 1..108: note = Description of Artificial Sequence: Synthetic polynucleotide
  source 1..108: mol_type = other DNA
ggttctactagcgaatctccgtctggcactgctccaggtacttctcctagcggtgaatcttctaccgctccaggtacttcccctagcggcgaatcttctaccgctcca

SEQ ID NO: 871 - DNA, 108 bp, synthetic construct
  misc_feature 1..108: note = Description of Artificial Sequence: Synthetic polynucleotide
  source 1..108: mol_type = other DNA
ggttctactagcgaatctccttctggtaccgctccaggtacttctacccctgaaagcggctccgcttctccaggttccactagctctaccgctgaatctccgggtcca

SEQ ID NO: 872 - DNA, 108 bp, synthetic construct
  misc_feature 1..108: note = Description of Artificial Sequence: Synthetic polynucleotide
  source 1..108: mol_type = other DNA
ggttccactagctctactgctgaatctcctggcccaggttctaccagctctaccgctgaatctcctggcccaggttctaccagcgaatctccgtctggcaccgcacca

SEQ ID NO: 873 - DNA, 108 bp, synthetic construct
  misc_feature 1..108: note = Description of Artificial Sequence: Synthetic polynucleotide
  source 1..108: mol_type = other DNA
ggttctactagcgaatccccgtctggtaccgcaccaggtacttctaccccggaaagcggctctgcttctccaggtacttctaccccggaaagcggctccgcatctcca

SEQ ID NO: 874 - DNA, 108 bp, synthetic construct
  misc_feature 1..108: note = Description of Artificial Sequence: Synthetic polynucleotide
  source 1..108: mol_type = other DNA
ggttctactagcgaatccccgtctggtactgctccaggtacttctactcctgaaagcggttccgcttctccaggtacctctactccggaaagcggttctgcatctcca

SEQ ID NO: 875 - DNA, 36 bp, synthetic construct
  misc_feature 1..36: note = Description of Artificial Sequence: Synthetic oligonucleotide
  source 1..36: mol_type = other DNA
aggtacycckggyagcggtacygcwtcttcytctcc

SEQ ID NO: 876 - DNA, 36 bp, synthetic construct
  misc_feature 1..36: note = Description of Artificial Sequence: Synthetic oligonucleotide
  source 1..36: mol_type = other DNA
acctggagargaagawgcrgtaccgctrccmggrgt

SEQ ID NO: 877 - DNA, 36 bp, synthetic construct
  misc_feature 1..36: note = Description of Artificial Sequence: Synthetic oligonucleotide
  source 1..36: mol_type = other DNA
aggtagctctacyccktctggtgcwacyggytcycc

SEQ ID NO: 878 - DNA, 36 bp, synthetic construct
  misc_feature 1..36: note = Description of Artificial Sequence: Synthetic oligonucleotide
  source 1..36: mol_type = other DNA
acctggrgarccrgtwgcaccagamggrgtagagct

SEQ ID NO: 879 - DNA, 36 bp, synthetic construct
  misc_feature 1..36: note = Description of Artificial Sequence: Synthetic oligonucleotide
  source 1..36: mol_type = other DNA
aggttctagcccktctgcwtcyacyggtacyggycc

SEQ ID NO: 880 - DNA, 36 bp, synthetic construct
  misc_feature 1..36: note = Description of Artificial Sequence: Synthetic oligonucleotide
  source 1..36: mol_type = other DNA
acctggrccrgtaccrgtrgawgcagamgggctaga

SEQ ID NO: 881 - DNA, 36 bp, synthetic construct
  misc_feature 1..36: note = Description of Artificial Sequence: Synthetic oligonucleotide
  source 1..36: mol_type = other DNA
aggtgcwtcycckggyacyagctctacyggttctcc

SEQ ID NO: 882 - DNA, 36 bp, synthetic construct
  misc_feature 1..36: note = Description of Artificial Sequence: Synthetic oligonucleotide
  source 1..36: mol_type = other DNA
acctggagaaccrgtagagctrgtrccmggrgawgc

SEQ ID NO: 883 - protein, 36 aa, synthetic construct
  REGION 1..36: note = Description of Artificial Sequence: Synthetic polypeptide
GASPGTSSTGSPGTPGSGTASSSPGSSTPSGATGSP

SEQ ID NO: 884 - protein, 36 aa, synthetic construct
  REGION 1..36: note = Description of Artificial Sequence: Synthetic polypeptide
GSSTPSGATGSPGSSPSASTGTGPGSSTPSGATGSP

SEQ ID NO: 885 - protein, 36 aa, synthetic construct
  REGION 1..36: note = Description of Artificial Sequence: Synthetic polypeptide
GASPGTSSTGSPGSSPSASTGTGPGSSTPSGATGSP

SEQ ID NO: 886 - protein, 36 aa, synthetic construct
  REGION 1..36: note = Description of Artificial Sequence: Synthetic polypeptide
GTPGSGTASSSPGSSTPSGATGSPGASPGTSSTGSP

SEQ ID NO: 887 - protein, 36 aa, synthetic construct
  REGION 1..36: note = Description of Artificial Sequence: Synthetic polypeptide
GTPGSGTASSSPGASPGTSSTGSPGSRPSASTGTGP

SEQ ID NO: 888 - protein, 36 aa, synthetic construct
  REGION 1..36: note = Description of Artificial Sequence: Synthetic polypeptide
GASPGTSSTGSPGSSTPSGATGSPGASPGTSSTGSP

SEQ ID NO: 889 - protein, 36 aa, synthetic construct
  REGION 1..36: note = Description of Artificial Sequence: Synthetic polypeptide
GTPGSGTASSSPGSSTPSGATGSPGSSTPSGATGSP

SEQ ID NO: 890 - protein, 36 aa, synthetic construct
  REGION 1..36: note = Description of Artificial Sequence: Synthetic polypeptide
GASPGTSSTGSPGASPGTSSTGSPGASPGTSSTGSP

SEQ ID NO: 891 - protein, 36 aa, synthetic construct
  REGION 1..36: note = Description of Artificial Sequence: Synthetic polypeptide
GSSTPSGATGSPGSSPSASTGTGPGASPGTSSTGSP

SEQ ID NO: 892 - protein, 36 aa, synthetic construct
  REGION 1..36: note = Description of Artificial Sequence: Synthetic polypeptide
GSSTPSGATGSPGSSTPSGATGSPGTPGSGTASSSP

SEQ ID NO: 893 - protein, 36 aa, synthetic construct
  REGION 1..36: note = Description of Artificial Sequence: Synthetic polypeptide
GSSTPSGATGSPGSSTPSGATGSPGASPGTSSTGSP

SEQ ID NO: 894 - protein, 36 aa, synthetic construct
  REGION 1..36: note = Description of Artificial Sequence: Synthetic polypeptide
GTPGSGTASSSPGSSPSASTGTGPGSSTPSGATGSP

SEQ ID NO: 895 - protein, 36 aa, synthetic construct
  REGION 1..36: note = Description of Artificial Sequence: Synthetic polypeptide
GASPGTSSTGSPGSSPSASTGTGPGTPGSGTASSSP

SEQ ID NO: 896 - protein, 36 aa, synthetic construct; identical to SEQ ID NO: 893
  REGION 1..36: note = Description of Artificial Sequence: Synthetic polypeptide

SEQ ID NO: 897 - protein, 36 aa, synthetic construct
  REGION 1..36: note = Description of Artificial Sequence: Synthetic polypeptide
GTPGSGTASSSPGSSTPSGATGSPGSSPSASTGTGP

SEQ ID NO: 898 - protein, 36 aa, synthetic construct
  REGION 1..36: note = Description of Artificial Sequence: Synthetic polypeptide
GSSTPSGATGSPGTPGSGTASSSPGTPGSGTASSSP

SEQ ID NO: 899 - protein, 36 aa, synthetic construct; identical to SEQ ID NO: 886
  REGION 1..36: note = Description of Artificial Sequence: Synthetic polypeptide

SEQ ID NO: 900 - protein, 36 aa, synthetic construct; identical to SEQ ID NO: 893
  REGION 1..36: note = Description of Artificial Sequence: Synthetic polypeptide

SEQ ID NO: 901 - protein, 36 aa, synthetic construct; identical to SEQ ID NO: 883
  REGION 1..36: note = Description of Artificial Sequence: Synthetic polypeptide

SEQ ID NO: 902 - protein, 36 aa, synthetic construct
  REGION 1..36: note = Description of Artificial Sequence: Synthetic polypeptide
GSSPSASTGTGPGSSTPSGATGSPGTPGSGTASSSP

SEQ ID NO: 903 - protein, 36 aa, synthetic construct; identical to SEQ ID NO: 885
  REGION 1..36: note = Description of Artificial Sequence: Synthetic polypeptide

SEQ ID NO: 904 - protein, 36 aa, synthetic construct
  REGION 1..36: note = Description of Artificial Sequence: Synthetic polypeptide
GASPGTSSTGSPGSSTPSGATGSPGSSTPSGATGSP

SEQ ID NO: 905 - protein, 36 aa, synthetic construct
  REGION 1..36: note = Description of Artificial Sequence: Synthetic polypeptide
GTPGSGTASSSPGSSTPSGATGSPGTPGSGTASSSP

SEQ ID NO: 906 - protein, 36 aa, synthetic construct; identical to SEQ ID NO: 804
  REGION 1..36: note = Description of Artificial Sequence: Synthetic polypeptide

SEQ ID NO: 907 - protein, 36 aa, synthetic construct
  REGION 1..36: note = Description of Artificial Sequence: Synthetic polypeptide
GASPGTSSTGSPGSSPSASTGTGPGSSPSASTGTGP

SEQ ID NO: 908 - protein, 36 aa, synthetic construct
  REGION 1..36: note = Description of Artificial Sequence: Synthetic polypeptide
GTPGSGTASSSPGASPGTSSTGSPGASPGTSSTGSP

SEQ ID NO: 909 - protein, 36 aa, synthetic construct
  REGION 1..36: note = Description of Artificial Sequence: Synthetic polypeptide
GSSTPSGATGSPGASPGTSSTGSPGSSTPSGATGSP

SEQ ID NO: 910 - protein, 36 aa, synthetic construct
  REGION 1..36: note = Description of Artificial Sequence: Synthetic polypeptide
GSSTPSGATGSPGTPGSGTASSSPGSSTPSGATGSP

SEQ ID NO: 911 - protein, 36 aa, synthetic construct; identical to SEQ ID NO: 885
  REGION 1..36: note = Description of Artificial Sequence: Synthetic polypeptide

SEQ ID NO: 912 - protein, 36 aa, synthetic construct
  REGION 1..36: note = Description of Artificial Sequence: Synthetic polypeptide
GSSTPSGATGSPGSSTPSGATGSPGSSTPSGATGSP

SEQ ID NO: 913 - protein, 36 aa, synthetic construct
  REGION 1..36: note = Description of Artificial Sequence: Synthetic polypeptide
GASPGTSSTGSPGTPGSGTASSSPGASPGTSSTGSP

SEQ ID NO: 914 - protein, 36 aa, synthetic construct; identical to SEQ ID NO: 891
  REGION 1..36: note = Description of Artificial Sequence: Synthetic polypeptide

SEQ ID NO: 915 - protein, 36 aa, synthetic construct
  REGION 1..36: note = Description of Artificial Sequence: Synthetic polypeptide
GASPGTSSTGSPGSSTPSGATGSPGSSPSASTGTGP

SEQ ID NO: 916 - protein, 36 aa, synthetic construct; identical to SEQ ID NO: 886
  REGION 1..36: note = Description of Artificial Sequence: Synthetic polypeptide

SEQ ID NO: 917 - protein, 36 aa, synthetic construct; identical to SEQ ID NO: 910
  REGION 1..36: note = Description of Artificial Sequence: Synthetic polypeptide

SEQ ID NO: 918 - protein, 36 aa, synthetic construct
  REGION 1..36: note = Description of Artificial Sequence: Synthetic polypeptide
GSSPSASTGTGPGSSPSASTGTGPGASPGTSSTGSP

SEQ ID NO: 919 - protein, 36 aa, synthetic construct
  REGION 1..36: note = Description of Artificial Sequence: Synthetic polypeptide
GTPGSGTASSSPGSSTPSGATGSPGSNPSASTGTGP

SEQ ID NO: 920 - protein, 36 aa, synthetic construct
  REGION 1..36: note = Description of Artificial Sequence: Synthetic polypeptide
GSSPSASTGTGPGSSTPSGATGSPGASPGTSSTGSP

SEQ ID NO: 921 - protein, 36 aa, synthetic construct
  REGION 1..36: note = Description of Artificial Sequence: Synthetic polypeptide
GSSTPSGATGSPGASPGTSSTGSPGTPGSGTASSSP

SEQ ID NO: 922 - protein, 36 aa, synthetic construct; identical to SEQ ID NO: 912
  REGION 1..36: note = Description of Artificial Sequence: Synthetic polypeptide

SEQ ID NO: 923 - protein, 36 aa, synthetic construct; identical to SEQ ID NO: 883
  REGION 1..36: note = Description of Artificial Sequence: Synthetic polypeptide

SEQ ID NO: 924 - protein, 36 aa, synthetic construct
  REGION 1..36: note = Description of Artificial Sequence: Synthetic polypeptide
GSSTPSGATGSPGSSPSASTGTGPGSSPSASTGTGP

SEQ ID NO: 925 - protein, 36 aa, synthetic construct; identical to SEQ ID NO: 907
  REGION 1..36: note = Description of Artificial Sequence: Synthetic polypeptide

SEQ ID NO: 926 - protein, 36 aa, synthetic construct; identical to SEQ ID NO: 895
  REGION 1..36: note = Description of Artificial Sequence: Synthetic polypeptide

SEQ ID NO: 927 - DNA, 108 bp, synthetic construct
  misc_feature 1..108: note = Description of Artificial Sequence: Synthetic polynucleotide
  source 1..108: mol_type = other DNA
ggtgcatccccgggcactagctctaccggttctccaggtactcctggtagcggtactgcttcttcttctccaggtagctctactccttctggtgctactggttctcca

SEQ ID NO: 928 - DNA, 108 bp, synthetic construct
  misc_feature 1..108: note = Description of Artificial Sequence: Synthetic polynucleotide
  source 1..108: mol_type = other DNA
ggtagctctaccccttctggtgctaccggctctccaggttctagcccgtctgcttctaccggtaccggtccaggtagctctaccccttctggtgctactggttctcca

SEQ ID NO: 929 - DNA, 108 bp, synthetic construct
  misc_feature 1..108: note = Description of Artificial Sequence: Synthetic polynucleotide
  source 1..108: mol_type = other DNA
ggtgcatctccgggtactagctctaccggttctccaggttctagcccttctgcttccactggtaccggcccaggtagctctaccccgtctggtgctactggttcccca

SEQ ID NO: 930 - DNA, 108 bp, synthetic construct
  misc_feature 1..108: note = Description of Artificial Sequence: Synthetic polynucleotide
  source 1..108: mol_type = other DNA
ggtactccgggcagcggtactgcttcttcctctccaggtagctctaccccttctggtgcaactggttccccaggtgcatcccctggtactagctctaccggttctcca

SEQ ID NO: 931 - DNA, 108 bp, synthetic construct
  misc_feature 1..108: note = Description of Artificial Sequence: Synthetic polynucleotide
  source 1..108: mol_type = other DNA
ggtacccctggcagcggtactgcttcttcttctccaggtgcttcccctggtaccagctctaccggttctccaggttctagaccttctgcatccaccggtactggtcca

SEQ ID NO: 932 - DNA, 108 bp, synthetic construct
  misc_feature 1..108: note = Description of Artificial Sequence: Synthetic polynucleotide
  source 1..108: mol_type = other DNA
ggtgcatctcctggtaccagctctaccggttctccaggtagctctactccttctggtgctactggctctccaggtgcttccccgggtaccagctctaccggttctcca

SEQ ID NO: 933 - DNA, 108 bp, synthetic construct
  misc_feature 1..108: note = Description of Artificial Sequence: Synthetic polynucleotide
  source 1..108: mol_type = other DNA
ggtaccccgggcagcggtaccgcatcttcctctccaggtagctctaccccgtctggtgctaccggttccccaggtagctctaccccgtctggtgcaaccggctcccca

SEQ ID NO: 934 - DNA, 108 bp, synthetic construct
  misc_feature 1..108: note = Description of Artificial Sequence: Synthetic polynucleotide
  source 1..108: mol_type = other DNA
ggtgcatctccgggcactagctctactggttctccaggtgcatcccctggcactagctctactggttctccaggtgcttctcctggtaccagctctactggttctcca

SEQ ID NO: 935 - DNA, 108 bp, synthetic construct
  misc_feature 1..108: note = Description of Artificial Sequence: Synthetic polynucleotide
  source 1..108: mol_type = other DNA
ggtagctctactccgtctggtgcaaccggctccccaggttctagcccgtctgcttccactggtactggcccaggtgcttccccgggcaccagctctactggttctcca

SEQ ID NO: 936 - DNA, 108 bp, synthetic construct
  misc_feature 1..108: note = Description of Artificial Sequence: Synthetic polynucleotide
  source 1..108: mol_type = other DNA
ggtagctctactccttctggtgctaccggttccccaggtagctctactccttctggtgctactggttccccaggtactccgggcagcggtactgcttcttcctctcca

SEQ ID NO: 937 - DNA, 108 bp, synthetic construct
  misc_feature 1..108: note = Description of Artificial Sequence: Synthetic polynucleotide
  source 1..108: mol_type = other DNA
ggtagctctactccgtctggtgcaaccggttccccaggtagctctactccttctggtgctactggctccccaggtgcatcccctggcaccagctctaccggttctcca

SEQ ID NO: 938 - DNA, 108 bp, synthetic construct
  misc_feature 1..108: note = Description of Artificial Sequence: Synthetic polynucleotide
  source 1..108: mol_type = other DNA
ggtactcctggtagcggtaccgcatcttcctctccaggttctagcccttctgcatctaccggtaccggtccaggtagctctactccttctggtgctactggctctcca

SEQ ID NO: 939 - DNA, 108 bp, synthetic construct
  misc_feature 1..108: note = Description of Artificial Sequence: Synthetic polynucleotide
  source 1..108: mol_type = other DNA
ggtgcttccccgggcactagctctaccggttctccaggttctagcccttctgcatctactggtactggcccaggtactccgggcagcggtactgcttcttcctctcca

SEQ ID NO: 940 - DNA, 108 bp, synthetic construct
  misc_feature 1..108: note = Description of Artificial Sequence: Synthetic polynucleotide
  source 1..108: mol_type = other DNA
ggtagctctactccgtctggtgctaccggctctccaggtagctctaccccttctggtgcaaccggctccccaggtgcttctccgggtaccagctctactggttctcca

SEQ ID NO: 941 - DNA, 108 bp, synthetic construct
  misc_feature 1..108: note = Description of Artificial Sequence: Synthetic polynucleotide
  source 1..108: mol_type = other DNA
ggtacccctggcagcggtaccgcttcttcctctccaggtagctctaccccgtctggtgctactggctctccaggttctagcccgtctgcatctaccggtaccggccca

SEQ ID NO: 942 - DNA, 108 bp, synthetic construct
  misc_feature 1..108: note = Description of Artificial Sequence: Synthetic polynucleotide
  source 1..108: mol_type = other DNA
ggtagctctactccttctggtgcaaccggctccccaggtaccccgggcagcggtaccgcatcttcctctccaggtactccgggtagcggtactgcttcttcttctcca

SEQ ID NO: 943 - DNA, 108 bp, synthetic construct
  misc_feature 1..108: note = Description of Artificial Sequence: Synthetic polynucleotide
  source 1..108: mol_type = other DNA
ggtaccccgggtagcggtactgcttcttcctctccaggtagctctaccccttctggtgcaaccggctctccaggtgcttctccgggcaccagctctaccggttctcca

SEQ ID NO: 944 - DNA, 108 bp, synthetic construct
  misc_feature 1..108: note = Description of Artificial Sequence: Synthetic polynucleotide
  source 1..108: mol_type = other DNA
ggtagctctaccccgtctggtgctaccggctctccaggtagctctaccccgtctggtgcaaccggctccccaggtgcatccccgggtactagctctaccggttctcca

SEQ ID NO: 945 - DNA, 108 bp, synthetic construct
  misc_feature 1..108: note = Description of Artificial Sequence: Synthetic polynucleotide
  source 1..108: mol_type = other DNA
ggtgcttctccgggcaccagctctactggttctccaggtaccccgggcagcggtaccgcatcttcttctccaggtagctctactccttctggtgcaactggttctcca

SEQ ID NO: 946 - DNA, 108 bp, synthetic construct
  misc_feature 1..108: note = Description of Artificial Sequence: Synthetic polynucleotide
  source 1..108: mol_type = other DNA
ggttctagcccgtctgcttccaccggtactggcccaggtagctctaccccgtctggtgcaactggttccccaggtacccctggtagcggtaccgcttcttcttctcca

SEQ ID NO: 947 - DNA, 108 bp, synthetic construct
  misc_feature 1..108: note = Description of Artificial Sequence: Synthetic polynucleotide
  source 1..108: mol_type = other DNA
ggtgcttctccgggcaccagctctactggttctccaggttctagcccttctgcatccaccggtaccggtccaggtagctctaccccttctggtgcaaccggctctcca

SEQ ID NO: 948 - DNA, 108 bp, synthetic construct
  misc_feature 1..108: note = Description of Artificial Sequence: Synthetic polynucleotide
  source 1..108: mol_type = other DNA
ggtgcatccccgggcaccagctctaccggttctccaggtagctctaccccgtctggtgctaccggctctccaggtagctctaccccgtctggtgctactggctctcca

SEQ ID NO: 949 - DNA, 108 bp, synthetic construct
  misc_feature 1..108: note = Description of Artificial Sequence: Synthetic polynucleotide
  source 1..108: mol_type = other DNA
ggtacccctggtagcggtactgcttcttcctctccaggtagctctactccgtctggtgctaccggttctccaggtaccccgggtagcggtaccgcatcttcttctcca

SEQ ID NO: 950 - DNA, 108 bp, synthetic construct
  misc_feature 1..108: note = Description of Artificial Sequence: Synthetic polynucleotide
  source 1..108: mol_type = other DNA
ggttctagcccttctgcttccaccggtactggcccaggtagctctaccccttctggtgctaccggctccccaggtagctctactccttctggtgcaactggctctcca

SEQ ID NO: 951 - DNA, 108 bp, synthetic construct
  misc_feature 1..108: note = Description of Artificial Sequence: Synthetic polynucleotide
  source 1..108: mol_type = other DNA
ggtgcttctcctggcaccagctctactggttctccaggttctagcccttctgcttctaccggtactggtccaggttctagcccttctgcatccactggtactggtcca

SEQ ID NO: 952 - DNA, 108 bp, synthetic construct
  misc_feature 1..108: note = Description of Artificial Sequence: Synthetic polynucleotide
  source 1..108: mol_type = other DNA
ggtactcctggcagcggtaccgcttcttcttctccaggtgcttctcctggtactagctctactggttctccaggtgcttctccgggcactagctctactggttctcca

SEQ ID NO: 953 - DNA, 108 bp, synthetic construct
  misc_feature 1..108: note = Description of Artificial Sequence: Synthetic polynucleotide
  source 1..108: mol_type = other DNA
ggtagctctaccccgtctggtgctaccggttccccaggtgcttctcctggtactagctctaccggttctccaggtagctctaccccgtctggtgctactggctctcca

SEQ ID NO: 954 - DNA, 108 bp, synthetic construct
  misc_feature 1..108: note = Description of Artificial Sequence: Synthetic polynucleotide
  source 1..108: mol_type = other DNA
ggtagctctaccccgtctggtgctactggttctccaggtactccgggcagcggtactgcttcttcctctccaggtagctctaccccttctggtgctactggctctcca

SEQ ID NO: 955 - DNA, 108 bp, synthetic construct
  misc_feature 1..108: note = Description of Artificial Sequence: Synthetic polynucleotide
  source 1..108: mol_type = other DNA
ggtgcatctcctggtaccagctctactggttctccaggttctagcccttctgcttctaccggtaccggtccaggtagctctactccttctggtgctaccggttctcca

SEQ ID NO: 956 - DNA, 108 bp, synthetic construct
  misc_feature 1..108: note = Description of Artificial Sequence: Synthetic polynucleotide
  source 1..108: mol_type = other DNA
ggtagctctaccccgtctggtgctactggctctccaggtagctctactccttctggtgctactggttccccaggtagctctaccccgtctggtgcaactggctctcca

SEQ ID NO: 957 - DNA, 108 bp, synthetic construct
  misc_feature 1..108: note = Description of Artificial Sequence: Synthetic polynucleotide
  source 1..108: mol_type = other DNA
ggtgcatccccgggtaccagctctaccggttctccaggtactcctggcagcggtactgcatcttcctctccaggtgcttctccgggcaccagctctactggttctcca

SEQ ID NO: 958 - DNA, 108 bp, synthetic construct
  misc_feature 1..108: note = Description of Artificial Sequence: Synthetic polynucleotide
  source 1..108: mol_type = other DNA
ggtagctctactccttctggtgcaactggttctccaggttctagcccgtctgcatccactggtaccggtccaggtgcttcccctggcaccagctctaccggttctcca

SEQ ID NO: 959 - DNA, 108 bp, synthetic construct
  misc_feature 1..108: note = Description of Artificial Sequence: Synthetic polynucleotide
  source 1..108: mol_type = other DNA
ggtgcatctcctggtactagctctactggttctccaggtagctctactccgtctggtgcaaccggctctccaggttctagcccttctgcatctaccggtactggtcca

SEQ ID NO: 960 - DNA, 108 bp, synthetic construct
  misc_feature 1..108: note = Description of Artificial Sequence: Synthetic polynucleotide
  source 1..108: mol_type = other DNA
ggtactcctggcagcggtaccgcatcttcctctccaggtagctctactccgtctggtgcaactggttccccaggtgcttctccgggtaccagctctaccggttctcca

SEQ ID NO: 961 - DNA, 108 bp, synthetic construct
  misc_feature 1..108: note = Description of Artificial Sequence: Synthetic polynucleotide
  source 1..108: mol_type = other DNA
ggtagctctaccccgtctggtgcaaccggctccccaggtactcctggtagcggtaccgcttcttcttctccaggtagctctactccgtctggtgctaccggctcccca

SEQ ID NO: 962 - DNA, 108 bp, synthetic construct
  misc_feature 1..108: note = Description of Artificial Sequence: Synthetic polynucleotide
  source 1..108: mol_type = other DNA
ggttctagcccttctgcatccaccggtaccggcccaggttctagcccgtctgcttctaccggtactggtccaggtgcttctccgggtactagctctactggttctcca

SEQ ID NO: 963 - DNA, 108 bp, synthetic construct
  misc_feature 1..108: note = Description of Artificial Sequence: Synthetic polynucleotide
  source 1..108: mol_type = other DNA
ggtaccccgggtagcggtaccgcttcttcttctccaggtagctctactccgtctggtgctaccggctctccaggttctaacccttctgcatccaccggtaccggccca

SEQ ID NO: 964 - DNA, 108 bp, synthetic construct
  misc_feature 1..108: note = Description of Artificial Sequence: Synthetic polynucleotide
  source 1..108: mol_type = other DNA
ggttctagcccttctgcatctactggtactggcccaggtagctctactccttctggtgctaccggctctccaggtgcttctccgggtactagctctaccggttctcca

SEQ ID NO: 965 - DNA, 108 bp, synthetic construct
  misc_feature 1..108: note = Description of Artificial Sequence: Synthetic polynucleotide
  source 1..108: mol_type = other DNA
ggtagctctaccccttctggtgcaaccggctctccaggtgcatccccgggtaccagctctaccggttctccaggtactccgggtagcggtaccgcttcttcctctcca

SEQ ID NO: 966 - DNA, 108 bp, synthetic construct
  misc_feature 1..108: note = Description of Artificial Sequence: Synthetic polynucleotide
  source 1..108: mol_type = other DNA
ggtagctctactccgtctggtgcaaccggttccccaggtagctctaccccttctggtgcaaccggctccccaggtagctctaccccttctggtgcaactggctctcca

SEQ ID NO: 967 - DNA, 108 bp, synthetic construct
  misc_feature 1..108: note = Description of Artificial Sequence: Synthetic polynucleotide
  source 1..108: mol_type = other DNA
ggtgcttctcctggcactagctctaccggttctccaggtacccctggtagcggtaccgcatcttcctctccaggtagctctactccttctggtgctactggttcccca

SEQ ID NO: 968 - DNA, 108 bp, synthetic construct
  misc_feature 1..108: note = Description of Artificial Sequence: Synthetic polynucleotide
  source 1..108: mol_type = other DNA
ggtagctctaccccgtctggtgctactggctccccaggttctagcccttctgcatccaccggtaccggtccaggttctagcccgtctgcatctactggtactggtcca

SEQ ID NO: 969 - DNA, 108 bp, synthetic construct
  misc_feature 1..108: note = Description of Artificial Sequence: Synthetic polynucleotide
  source 1..108: mol_type = other DNA
ggtgcttccccgggcaccagctctactggttctccaggttctagcccgtctgcttctactggtactggtccaggttctagcccttctgcttccactggtactggtcca

SEQ ID NO: 970 - DNA, 108 bp, synthetic construct
  misc_feature 1..108: note = Description of Artificial Sequence: Synthetic polynucleotide
  source 1..108: mol_type = other DNA
ggtgcttccccgggtaccagctctaccggttctccaggttctagcccttctgcttctaccggtaccggtccaggtacccctggcagcggtaccgcatcttcctctcca

SEQ ID NO: 971 - DNA, 3183 bp, synthetic construct
  misc_feature 1..3183: note = Description of Artificial Sequence: Synthetic polynucleotide
  source 1..3183: mol_type = other DNA
atggcaaatacaccggtatcaggcaatttgaaggttgaattctacaacagcaatccttcagatactactaactcaatcaatcctcagttcaaggttactaataccggaagcagtgcaattgatttgtccaaactcacattgagatattattatacagtagacggacagaaagatcagaccttctgggctgaccatgctgcaataatcggcagtaacggcagctacaacggaattacttcaaatgtaaaaggaacatttgtaaaaatgagttcctcaacaaataacgcagacacctaccttgaaatcagctttacaggcggaactcttgaaccgggtgcacatgttcagatacaaggtagatttgcaaagaatgactggagtaactatacacagtcaaatgactactcattcaagtctgcttcacagtttgttgaatgggatcaggtaacagcatacttgaacggtgttcttgtatggggtaaagaacccggtggcagtgtagtaggttcaggttcaggatccgaaaatctgtattttcagggtgggtctccaggtagcccggctggctctcctacctctactgaggaaggtacttctgaaagcgctactcctgagtctggtccaggtacctctactgaaccgtccgaaggtagcgctccaggtagcccagcaggctctccgacttccactgaggaaggtacttctactgaaccttccgaaggcagcgcaccaggtacctctactgaaccttctgagggcagcgctccaggtacttctgaaagcgctaccccggaatctggcccaggtagcgaaccggctacttctggttctgaaaccccaggtagcgaaccggctacctccggttctgaaactccaggtagcccggcaggctctccgacctctactgaggaaggtacttctgaaagcgcaaccccggagtccggcccaggtacctctaccgaaccgtctgagggcagcgcaccaggtacttctaccgaaccgtccgagggtagcgcaccaggtagcccagcaggttctcctacctccaccgaggaaggtacttctaccgaaccgtccgagggtagcgcaccaggtacctctactgaaccttctgagggcagcgctccaggtacttctgaaagcgctaccccggagtccggtccaggtacttctactgaaccgtccgaaggtagcgcaccaggtacttctgaaagcgcaacccctgaatccggtccaggtagcgaaccggctacttctggctctgagactccaggtacttctaccgaaccgtccgaaggtagcgcaccaggtacttctactgaaccgtctgaaggtagcgcaccaggtacttctgaaagcgcaaccccggaatccggcccaggtacctctgaaagcgcaaccccggagtccggcccaggtagccctgctggctctccaacctccaccgaagaaggtacctctgaaagcgcaacccctgaatccggcccaggtagcgaaccggcaacctccggttctgaaaccccaggtacctctgaaagcgctactccggagtctggcccaggtacctctactgaaccgtctgagggtagcgctccaggtacttctactgaaccgtccgaaggtagcgcaccaggtacttctaccgaaccgtccgaaggcagcgctccaggtacctctactgaaccttccgagggcagcgctccaggtacctctaccgaaccttctgaaggtagcgcaccaggtacttctaccgaaccgtccgagggtagcgcaccaggtagcccagcaggttctcctacctccaccgaggaaggtacttctaccgaaccgtccgagggtagcgcaccaggtacctctgaaagcgcaactcctgagtctggcccaggtagcgaacctgctacctccggctctgagactccaggtacctctgaaagcgcaaccccggaatctggtccaggtagcgaacctgcaacctctggctctgaaaccccaggtacctctgaaagcgctactcctgaatctggcccaggtacttctactgaaccgtccgagggcagcgcaccaggtacttctgaaagcgctactcctgagtccggcccaggtagcccggctggctctccgacttccaccgaggaaggtagcccggctggctctccaacttctactgaagaaggtagcccggcaggctctccgacctctactgaggaaggtacttctgaaagcgcaaccccggagtccggcccaggtacctctaccgaaccgtctgagggcagcgcaccaggtggtagcccggctggctcttgtacctctccaggtacctctgaaagcgcaactcctgagtctggcccaggtagcgaacctgctacctccggctctgagactccaggtacctctgaaagcgcaaccccggaatctggtccaggtagcgaacctgcaacctctggctctgaaaccccaggtacctctgaaagcgctactcctgaatctggcccaggtacttctactgaaccgtccgagggcagcgcaccaggtagccctgctggctctccaacctccaccgaagaaggtacctctgaaagcgcaacccctgaatccggcccaggtagcgaaccggcaacctccggttctgaaaccccaggtacttctgaaagcgctactcctgagtccggcccaggtagcccggctggctctccgacttccaccgaggaaggtagcccggctggctctccaacttctactgaagaaggtacttctaccgaaccttccgagggcagcgcaccaggtacttctgaaagcgctacccctgagtccggcccaggtacttctgaaagcgctactcctgaatccggtccaggtacttctgaaagcgctaccccggaatctggcccaggtagcgaaccggctacttctggttctgaaaccccaggtagcgaaccggctacctccggttctgaaactccaggtagcccagcaggctctccgacttccactgaggaaggtacttctactgaaccttccgaaggcagcgcaccaggtacctctactgaaccttctgagggcagcgctccaggtagcgaacctgcaacctctggctctgaaaccccaggtacctctgaaagcgctactcctgaatctggcccaggtacttctactgaaccgtccgagggcagcgcaccaggttaa

SEQ ID NO: 972 - protein, 1060 aa, synthetic construct
  REGION 1..1060: note = Description of Artificial Sequence: Synthetic polypeptide
MANTPVSGNLKVEFYNSNPSDTTNSINPQFKVTNTGSSAIDLSKLTLRYYYTVDGQKDQTFWADHAAIIGSNGSYNGITSNVKGTFVKMSSSTNNADTYLEISFTGGTLEPGAHVQIQGRFAKNDWSNYTQSNDYSFKSASQFVEWDQVTAYLNGVLVWGKEPGGSVVGSGSGSENLYFQGGSPGSPAGSPTSTEEGTSESATPESGPGTSTEPSEGSAPGSPAGSPTSTEEGTSTEPSEGSAPGTSTEPSEGSAPGTSESATPESGPGSEPATSGSETPGSEPATSGSETPGSPAGSPTSTEEGTSESATPESGPGTSTEPSEGSAPGTSTEPSEGSAPGSPAGSPTSTEEGTSTEPSEGSAPGTSTEPSEGSAPGTSESATPESGPGTSTEPSEGSAPGTSESATPESGPGSEPATSGSETPGTSTEPSEGSAPGTSTEPSEGSAPGTSESATPESGPGTSESATPESGPGSPAGSPTSTEEGTSESATPESGPGSEPATSGSETPGTSESATPESGPGTSTEPSEGSAPGTSTEPSEGSAPGTSTEPSEGSAPGTSTEPSEGSAPGTSTEPSEGSAPGTSTEPSEGSAPGSPAGSPTSTEEGTSTEPSEGSAPGTSESATPESGPGSEPATSGSETPGTSESATPESGPGSEPATSGSETPGTSESATPESGPGTSTEPSEGSAPGTSESATPESGPGSPAGSPTSTEEGSPAGSPTSTEEGSPAGSPTSTEEGTSESATPESGPGTSTEPSEGSAPGGSPAGSCTSPGTSESATPESGPGSEPATSGSETPGTSESATPESGPGSEPATSGSETPGTSESATPESGPGTSTEPSEGSAPGSPAGSPTSTEEGTSESATPESGPGSEPATSGSETPGTSESATPESGPGSPAGSPTSTEEGSPAGSPTSTEEGTSTEPSEGSAPGTSESATPESGPGTSESATPESGPGTSESATPESGPGSEPATSGSETPGSEPATSGSETPGSPAGSPTSTEEGTSTEPSEGSAPGTSTEPSEGSAPGSEPATSGSETPGTSESATPESGPGTSTEPSEGSAPG

SEQ ID NO: 973 - protein, 16 aa, synthetic construct
  REGION 1..16: note = Description of Artificial Sequence: Synthetic peptide
GRATAEAAGCGTAEAA

SEQ ID NO: 974 - protein, 6 aa, synthetic construct
  REGION 1..6: note = Description of Artificial Sequence: Synthetic peptide
TAEAAG

SEQ ID NO: 975 - protein, 8 aa, synthetic construct
  REGION 1..8: note = Description of Artificial Sequence: Synthetic peptide
GCGTAEAA

SEQ ID NO: 976 - protein, 14 aa, synthetic construct
  REGION 1..14: note = Description of Artificial Sequence: Synthetic peptide
TAEAAGCGTAEAAR

SEQ ID NO: 977 - DNA, 3270 bp, synthetic construct
  misc_feature 1..3270: note = Description of Artificial Sequence: Synthetic polynucleotide
  source 1..3270: mol_type = other DNA
atggctaataccccagtgagcggcaacctgaaagtggaattctacaatagcaacccgagcgacaccaccaacagcattaatccgcagttcaaagtgaccaacacgggtagctccgcgatcgatctgtcgaagctgacgctgcgttactattacacggttgacggtcagaaagatcagacgttctgggctgaccatgcggccattattggcagcaacggttcctacaacggtatcacgagcaatgtcaaaggcacttttgttaagatgagctcttcgaccaacaatgccgatacctatctggagattagcttcaccggtggtactctggagccgggtgcacacgttcaaatccaaggtcgcttcgcaaagaatgactggagcaactatacccagtccaatgactacagcttcaaaagcgctagccaatttgttgaatgggatcaggtcaccgcatacctgaacggcgtgctggtctggggcaaggaaccgggtggtagcgttgtcggttctggcagcggatccggtcgtgcgacggcagaagccgctggctgcggtactgctgaagcggcaggtagcccagctggtagcccaacctctaccgaagaaggtacctctgaatccgctactccagaatccggtcctggtactagcactgagccaagcgaaggttctgctccaggctccccggcaggtagccctacctctaccgaagagggcactagcaccgaaccatctgagggttccgctcctggcacctccactgaaccgtccgaaggcagtgctccgggtacttccgaaagcgcaactccggaatccggccctggttctgagcctgctacttccggctctgaaactccaggtagcgagccagcgacttctggttctgaaactccaggttcaccggcgggtagcccgacgagcacggaggaaggtacctctgagtcggccactcctgagtccggtccgggcacgagcaccgagccgagcgagggttcagccccgggtaccagcacggagccgtccgagggtagcgcaccgggttctccggcgggctcccctacgtctacggaagagggtacgtccactgaacctagcgagggcagcgcgccaggcaccagcactgaaccgagcgaaggcagcgcacctggcactagcgagtctgcgactccggagagcggtccgggtacgagcacggaaccaagcgaaggcagcgccccaggtacctctgaatctgctaccccagaatctggcccgggttccgagccagctacctctggttctgaaaccccaggtacttccactgaaccaagcgaaggtagcgctcctggcacttctactgaaccatccgaaggttccgctcctggtacgtctgaaagcgctacccctgaaagcggcccaggcacctctgaaagcgctactcctgagagcggtccaggctctccagcaggttctccaacctccactgaagaaggcacctctgagtctgctacccctgaatctggtcctggctccgaacctgctacctctggttccgaaactccaggtacctcggaatctgcgactccggaatctggcccgggcacgagcacggagccgtctgagggtagcgcaccaggtaccagcactgagccttctgagggctctgcaccgggtacctccacggaaccttcggaaggttctgcgccgggtacctccactgagccatccgagggttcagcaccaggtactagcacggaaccgtccgagggctctgcaccaggtacgagcaccgaaccgtcggagggtagcgctccaggtagcccagcgggctctccgacaagcaccgaagaaggcaccagcaccgagccgtccgaaggttccgcaccaaccgctgaagccgcaggttgtggcactgcggaagctgcaggtacaagcgagagcgcgactcctgaatctggtccgggtagcgagcctgcaaccagcggttctgagacgccgggcacttccgaatctgcgaccccggagtccggtccaggttcagagccggcgacgagcggttcggaaacgccgggtacgtctgaatcagccacgccggagtctggtccgggtacctcgaccgaaccaagcgaaggttcggcaccgggtactagcgagagcgcaacccctgaaagcggtccgggcagcccggcaggttctccaaccagcaccgaagaaggttcccctgctggtagcccgacctctacggaggaaggtagccctgcaggttccccaacttctactgaggaaggtacttctgagtccgctaccccagaaagcggtcctggtacctccactgaaccgtctgaaggctctgcaccaggcacttctgagtctgctactccagaaagcggcccaggttctgaaccagcaacttctggctctgagactccaggcacttctgagtccgcaacgcctgaatccggtcctggttctgaaccagctacttccggcagcgaaaccccaggtacctctgagtctgcgactccagagtctggtcctggtacttccactgagcctagcgagggttccgcaccaggttctccggctggtagcccgaccagcacggaggagggtacgtctgaatctgcaacgccggaatcgggcccaggttcggagcctgcaacgtctggcagcgaaaccccgggtacctccgaatctgctacaccggaaagcggtcctggcagccctgctggttctccaacctctaccgaggagggttcaccggcaggtagcccgactagcactgaagaaggtactagcacggagccgagcgagggtagtgctccgggtacgagcgagagcgcaacgccagagagcggtccaggcaccagcgaatcggccacccctgagagcggcccaggtacttctgagagcgccactcctgaatccggccctggtagcgagccggcaacctccggctcagaaactcctggttcggaaccagcgaccagcggttctgaaactccgggtagcccggcaggcagcccaacgagcaccgaagagggtaccagcacggaaccgagcgagggttctgccccgggtacttccaccgaaccatcggagggctctgcacctggtagcgaacctgcgacgtctggttctgaaacgccgggtaccagcgaaagcgctaccccagaatccggtccgggcactagcaccgagccatcggagggctccgcaccaactgcagaagcggctggttgtggcaccgccgaagcagctcgtcatcaccatcaccaccatcatcactaa

SEQ ID NO: 978 - protein, 1089 aa, synthetic construct
  REGION 1..1089: note = Description of Artificial Sequence: Synthetic polypeptide
MANTPVSGNLKVEFYNSNPSDTTNSINPQFKVTNTGSSAIDLSKLTLRYYYTVDGQKDQTFWADHAAIIGSNGSYNGITSNVKGTFVKMSSSTNNADTYLEISFTGGTLEPGAHVQIQGRFAKNDWSNYTQSNDYSFKSASQFVEWDQVTAYLNGVLVWGKEPGGSVVGSGSGSGRATAEAAGCGTAEAAGSPAGSPTSTEEGTSESATPESGPGTSTEPSEGSAPGSPAGSPTSTEEGTSTEPSEGSAPGTSTEPSEGSAPGTSESATPESGPGSEPATSGSETPGSEPATSGSETPGSPAGSPTSTEEGTSESATPESGPGTSTEPSEGSAPGTSTEPSEGSAPGSPAGSPTSTEEGTSTEPSEGSAPGTSTEPSEGSAPGTSESATPESGPGTSTEPSEGSAPGTSESATPESGPGSEPATSGSETPGTSTEPSEGSAPGTSTEPSEGSAPGTSESATPESGPGTSESATPESGPGSPAGSPTSTEEGTSESATPESGPGSEPATSGSETPGTSESATPESGPGTSTEPSEGSAPGTSTEPSEGSAPGTSTEPSEGSAPGTSTEPSEGSAPGTSTEPSEGSAPGTSTEPSEGSAPGSPAGSPTSTEEGTSTEPSEGSAPTAEAAGCGTAEAAGTSESATPESGPGSEPATSGSETPGTSESATPESGPGSEPATSGSETPGTSESATPESGPGTSTEPSEGSAPGTSESATPESGPGSPAGSPTSTEEGSPAGSPTSTEEGSPAGSPTSTEEGTSESATPESGPGTSTEPSEGSAPGTSESATPESGPGSEPATSGSETPGTSESATPESGPGSEPATSGSETPGTSESATPESGPGTSTEPSEGSAPGSPAGSPTSTEEGTSESATPESGPGSEPATSGSETPGTSESATPESGPGSPAGSPTSTEEGSPAGSPTSTEEGTSTEPSEGSAPGTSESATPESGPGTSESATPESGPGTSESATPESGPGSEPATSGSETPGSEPATSGSETPGSPAGSPTSTEEGTSTEPSEGSAPGTSTEPSEGSAPGSEPATSGSETPGTSESATPESGPGTSTEPSEGSAPTAEAAGCGTAEAARHHHHHHHH

SEQ ID NO: 979 - protein, 5 aa, synthetic construct
  REGION 1..5: note = Description of Artificial Sequence: Synthetic peptide
GRGSP

SEQ ID NO: 980 - protein, 9 aa, synthetic construct
  REGION 1..9: note = Description of Artificial Sequence: Synthetic peptide
GKPGTAEAA

SEQ ID NO: 981 - protein, 4 aa, synthetic construct
  REGION 1..4: note = Description of Artificial Sequence: Synthetic peptide
GKAT

SEQ ID NO: 982 - protein, 14 aa, synthetic construct
  REGION 1..14: note = Description of Artificial Sequence: Synthetic peptide
TAEAAGKPGTAEAA

SEQ ID NO: 983 - DNA, 3210 bp, synthetic construct
  misc_feature 1..3210: note = Description of Artificial Sequence: Synthetic polynucleotide
  source 1..3210: mol_type = other DNA
atggctaataccccagtgagcggcaacctgaaagtggaattctacaatagcaacccgagcgacaccaccaacagcattaatccgcagttcaaagtgaccaacacgggtagctccgcgatcgatctgtcgaagctgacgctgcgttactattacacggttgacggtcagaaagatcagacgttctgggctgaccatgcggccattattggcagcaacggttcctacaacggtatcacgagcaatgtcaaaggcacttttgttaagatgagctcttcgaccaacaatgccgatacctatctggagattagcttcaccggtggtactctggagccgggtgcacacgttcaaatccaaggtcgcttcgcaaagaatgactggagcaactatacccagtccaatgactacagcttcaaaagcgctagccaatttgttgaatgggatcaggtcaccgcatacctgaacggcgtgctggtctggggcaaggaaccgggtggtagcgttgtcggttctggcagcggatccggtcgtgggtctccaggtagcccagctggtagcccaacctctaccgaagaaggtacctctgaatccgctactccagaatccggtcctggtactagcactgagccaagcgaaggttctgctccaggctccccggcaggtagccctacctctaccgaagagggcactagcaccgaaccatctgagggttccgctcctggcacctccactgaaccgtccgaaggcagtgctccgggtacttccgaaagcgcaactccggaatccggccctggttctgagcctgctacttccggctctgaaactccaggtagcgagccagcgacttctggttctgaaactccaggttcaccggcgggtagcccgacgagcacggaggaaggtacctctgagtcggccactcctgagtccggtccgggcacgagcaccgagccgagcgagggttcagccccgggtaccagcacggagccgtccgagggtagcgcaccgggttctccggcgggctcccctacgtctacggaagagggtacgtccactgaacctagcgagggcagcgcgccaggcaccagcactgaaccgagcgaaggcagcgcacctggcactagcgagtctgcgactccggagagcggtccgggtacgagcacggaaccaagcgaaggcagcgccccaggtacctctgaatctgctaccccagaatctggcccgggttccgagccagctacctctggttctgaaaccccaggtacttccactgaaccaagcgaaggtagcgctcctggcacttctactgaaccatccgaaggttccgctcctggtacgtctgaaagcgctacccctgaaagcggcccaggcacctctgaaagcgctactcctgagagcggtccaggctctccagcaggttctccaacctccactgaagaaggcacctctgagtctgctacccctgaatctggtcctggctccgaacctgctacctctggttccgaaactccaggtacctcggaatctgcgactccggaatctggcccgggcacgagcacggagccgtctgagggtagcgcaccaggtaccagcactgagccttctgagggctctgcaccgggtacctccacggaaccttcggaaggttctgcgccgggtacctccactgagccatccgagggttcagcaccaggtactagcacggaaccgtccgagggctctgcaccaggtacgagcaccgaaccgtcggagggtagcgctccaggtagcccagcgggctctccgacaagcaccgaagaaggcaccagcaccgagccgtccgaaggttccgcaccaaccgctgaagccgcaggtaaaccgggcactgcggaagctgcaggtacaagcgagagcgcgactcctgaatctggtccgggtagcgagcctgcaaccagcggttctgagacgccgggcacttccgaatctgcgaccccggagtccggtccaggttcagagccggcgacgagcggttcggaaacgccgggtacgtctgaatcagccacgccggagtctggtccgggtacctcgaccgaaccaagcgaaggttcggcaccgggtactagcgagagcgcaacccctgaaagcggtccgggcagcccggcaggttctccaaccagcaccgaagaaggttcccctgctggtagcccgacctctacggaggaaggtagccctgcaggttccccaacttctactgaggaaggtacttctgagtccgctaccccagaaagcggtcctggtacctccactgaaccgtctgaaggctctgcaccaggcacttctgagtctgctactccagaaagcggcccaggttctgaaccagcaacttctggctctgagactccaggcacttctgagtccgcaacgcctgaatccggtcctggttctgaaccagctacttccggcagcgaaaccccaggtacctctgagtctgcgactccagagtctggtcctggtacttccactgagcctagcgagggttccgcaccaggttctccggctggtagcccgaccagcacggaggagggtacgtctgaatctgcaacgccggaatcgggcccaggttcggagcctgcaacgtctggcagcgaaaccccgggtacctccgaatctgctacaccggaaagcggtcctggcagccctgctggttctccaacctctaccgaggagggttcaccggcaggtagcccgactagcactgaagaaggtactagcacggagccgagcgagggtagtgctccgggtacgagcgagagcgcaacgccagagagcggtccaggcaccagcgaatcggccacccctgagagcggcccaggtacttctgagagcgccactcctgaatccggccctggtagcgagccggcaacctccggctcagaaactcctggttcggaaccagcgaccagcggttctgaaactccgggtagcccggcaggcagcccaacgagcaccgaagagggtaccagcacggaaccgagcgagggttctgccccgggtacttccaccgaaccatcggagggctctgcacctggtagcgaacctgcgacgtctggttctgaaacgccgggtaccagcgaaagcgctaccccagaatccggtccgggcactagcaccgagccatcggagggctccgcaccaggtaaagcgacccatcaccatcaccaccatcatcactaa

SEQ ID NO: 984 - protein, 1069 aa, synthetic construct
  REGION 1..1069: note = Description of Artificial Sequence: Synthetic polypeptide
MANTPVSGNLKVEFYNSNPSDTTNSINPQFKVTNTGSSAIDLSKLTLRYYYTVDGQKDQTFWADHAAIIGSNGSYNGITSNVKGTFVKMSSSTNNADTYLEISFTGGTLEPGAHVQIQGRFAKNDWSNYTQSNDYSFKSASQFVEWDQVTAYLNGVLVWGKEPGGSVVGSGSGSGRGSPGSPAGSPTSTEEGTSESATPESGPGTSTEPSEGSAPGSPAGSPTSTEEGTSTEPSEGSAPGTSTEPSEGSAPGTSESATPESGPGSEPATSGSETPGSEPATSGSETPGSPAGSPTSTEEGTSESATPESGPGTSTEPSEGSAPGTSTEPSEGSAPGSPAGSPTSTEEGTSTEPSEGSAPGTSTEPSEGSAPGTSESATPESGPGTSTEPSEGSAPGTSESATPESGPGSEPATSGSETPGTSTEPSEGSAPGTSTEPSEGSAPGTSESATPESGPGTSESATPESGPGSPAGSPTSTEEGTSESATPESGPGSEPATSGSETPGTSESATPESGPGTSTEPSEGSAPGTSTEPSEGSAPGTSTEPSEGSAPGTSTEPSEGSAPGTSTEPSEGSAPGTSTEPSEGSAPGSPAGSPTSTEEGTSTEPSEGSAPTAEAAGKPGTAEAAGTSESATPESGPGSEPATSGSETPGTSESATPESGPGSEPATSGSETPGTSESATPESGPGTSTEPSEGSAPGTSESATPESGPGSPAGSPTSTEEGSPAGSPTSTEEGSPAGSPTSTEEGTSESATPESGPGTSTEPSEGSAPGTSESATPESGPGSEPATSGSETPGTSESATPESGPGSEPATSGSETPGTSESATPESGPGTSTEPSEGSAPGSPAGSPTSTEEGTSESATPESGPGSEPATSGSETPGTSESATPESGPGSPAGSPTSTEEGSPAGSPTSTEEGTSTEPSEGSAPGTSESATPESGPGTSESATPESGPGTSESATPESGPGSEPATSGSETPGSEPATSGSETPGSPAGSPTSTEEGTSTEPSEGSAPGTSTEPSEGSAPGSEPATSGSETPGTSESATPESGPGTSTEPSEGSAPGKATHHHHHHHH

SEQ ID NO: 985 - DNA, 1029 bp, synthetic construct
  misc_feature 1..1029: note = Description of Artificial Sequence: Synthetic polynucleotide
  source 1..1029: mol_type = other DNA
atgaaaaacccagagcaagcagaagaacaagctgaagaacagcgcgaagaaacacgtccgcgtcctcgcccacgtccacgtccgcgtccacgccctcgtcctcgtccgcgccctcgtccgagcgcgtctcgttccgctgggtctccaacgggcccaggttctgaaccagcaacttctggctctgagactccaggcacttctgagtccgcaacgcctgaatccggtcctggttctgaaccagctacttccggcagcgaaaccccaggtacctctgagtctgcgactccagagtctggtcctggtacttccactgagcctagcgagggttccgcaccaggttctccggctggtagcccgaccagcacggaggagggtacgtctgaatctgcaacgccggaatcgggcccaggttcggagcctgcaacgtctggcagcgaaaccccgggtacctccgaatctgctacaccggaaagcggtcctggcagccctgctggttctccaacctctaccgaggagggttcaccggcaggtagcccgactagcactgaagaaggtactagcacggagccgagcgagggtagtgctccgggtacgagcgagagcgcaacgccagagagcggtccaggcaccagcgaatcggccacccctgagagcggcccaggtacttctgagagcgccactcctgaatccggccctggtagcgagccggcaacctccggctcagaaactcctggttcggaaccagcgaccagcggttctgaaactccgggtagcccggcaggcagcccaacgagcaccgaagagggtaccagcacggaaccgagcgagggttctgccccgggtacttccaccgaaccatcggagggctctgcacctggtagcgaacctgcgacgtctggttctgaaacgccgggtaccagcgaaagcgctaccccagaatccggtccgggcactagcaccgagccatcggagggctccgcaccaagcgcctctcgctccgcacatcaccatcaccaccatcatcactaa

SEQ ID NO: 986 - protein, 342 aa, synthetic construct; identical to SEQ ID NO: 375
  REGION 1..342: note = Description of Artificial Sequence: Synthetic polypeptide

SEQ ID NO: 987 - protein, 20 aa, synthetic construct
  REGION 1..20: note = Description of Artificial Sequence: Synthetic peptide
MAENQYYGTGRRKSSAARVF

SEQ ID NO: 988 - protein, 20 aa, synthetic construct
  REGION 1..20: note = Description of Artificial Sequence: Synthetic peptide
MAVQQNKPTRSKRGMRRSHD

SEQ ID NO: 989 - protein, 20 aa, synthetic construct
  REGION 1..20: note = Description of Artificial Sequence: Synthetic peptide
MANIKSAKKRAIQSEKARKH

SEQ ID NO: 990 - protein, 20 aa, synthetic construct
  REGION 1..20: note = Description of Artificial Sequence: Synthetic peptide
MSSKEQKTPEGQAPEEIIMD

SEQ ID NO: 991 - protein, 20 aa, synthetic construct
  REGION 1..20: note = Description of Artificial Sequence: Synthetic peptide
MAKQSMKAREVKRVALADKY

SEQ ID NO: 992 - protein, 20 aa, synthetic construct
  REGION 1..20: note = Description of Artificial Sequence: Synthetic peptide
MATVNQLVRKPRARKVAKSN

SEQ ID NO: 993 - protein, 20 aa, synthetic construct
  REGION 1..20: note = Description of Artificial Sequence: Synthetic peptide
MSKEKFERTKPHVNVGTIGH

SEQ ID NO: 994 - protein, 20 aa, synthetic construct
  REGION 1..20: note = Description of Artificial Sequence: Synthetic peptide
MSLSTEATAKIVSEFGRDAN

SEQ ID NO: 995 - protein, 20 aa, synthetic construct
  REGION 1..20: note = Description of Artificial Sequence: Synthetic peptide
MSYTLPSLPYAYDALEPHFD

SEQ ID NO: 996 - protein, 20 aa, synthetic construct
  REGION 1..20: note = Description of Artificial Sequence: Synthetic peptide
MANPEQLEEQREETRLIIEE

SEQ ID NO: 997 - protein, 20 aa, synthetic construct
  REGION 1..20: note = Description of Artificial Sequence: Synthetic peptide
MANTPVSGNLKVEFYNSNPS

SEQ ID NO: 998 - protein, 20 aa, synthetic construct
  REGION 1..20: note = Description of Artificial Sequence: Synthetic peptide
MANTPVSGNLKVEFYNSNPS

SEQ ID NO: 999 - protein, 18 aa, synthetic construct
  REGION 1..18: note = Description of Artificial Sequence: Synthetic peptide
MAENQYYGTGRRKSSAAR

SEQ ID NO: 1000 - protein, 20 aa, synthetic construct
  REGION 1..20: note = Description of Artificial Sequence: Synthetic peptide
MAAQQNKPTRSKRGARRSHD

SEQ ID NO: 1001 - protein, 20 aa, synthetic construct
  REGION 1..20: note = Description of Artificial Sequence: Synthetic peptide
MANAKSAKKRAAQSEKARKH

SEQ ID NO: 1002 - protein, 16 aa, synthetic construct
  REGION 1..16: note = Description of Artificial Sequence: Synthetic peptide
MSSKEQKTPEGQAPEE

SEQ ID NO: 1003 - protein, 20 aa, synthetic construct
  REGION 1..20: note = Description of Artificial Sequence: Synthetic peptide
MAKQSAKAREAKRAASADKY

SEQ ID NO: 1004 - protein, 20 aa, synthetic construct
  REGION 1..20: note = Description of Artificial Sequence: Synthetic peptide
MATANQAARKPRARKAAKSN

SEQ ID NO: 1005 - protein, 17 aa, synthetic construct
  REGION 1..17: note = Description of Artificial Sequence: Synthetic peptide
MSKEKAERTKPHANAGT

SEQ ID NO: 1006 - protein, 20 aa, synthetic construct
  REGION 1..20: note = Description of Artificial Sequence: Synthetic peptide
MSASTEATAKAASEAGRDAN

SEQ ID NO: 1007 - protein, 18 aa, synthetic construct
  REGION 1..18: note = Description of Artificial Sequence: Synthetic peptide
MSYTAPSAPYAYDAAEPH

SEQ ID NO: 1008 - protein, 15 aa, synthetic construct
  REGION 1..15: note = Description of Artificial Sequence: Synthetic peptide
MANPEQAEEQREETR

SEQ ID NO: 1009 - protein, 20 aa, synthetic construct
  REGION 1..20: note = Description of Artificial Sequence: Synthetic peptide
MANTPASGNAKAEAYNSNPS

SEQ ID NO: 1010 - protein, 20 aa, synthetic construct
  REGION 1..20: note = Description of Artificial Sequence: Synthetic peptide
MANTPVSGNLKVEFYNSNPS

SEQ ID NO: 1011 - DNA, 92 bp, synthetic construct
  misc_feature 1..92: note = Description of Artificial Sequence: Synthetic oligonucleotide
  source 1..92: mol_type = other DNA
cgtccgcgtcctcgcccacgtccacgtccgcgtccacgccctcgtcctcgtccgcgccctcgtccgagcgcgtctcgttccgctgggtctcc

SEQ ID NO: 1012 - DNA, 92 bp, synthetic construct
  misc_feature 1..92: note = Description of Artificial Sequence: Synthetic oligonucleotide
  source 1..92: mol_type = other DNA
acctggagacccagcggaacgagacgcgctcggacgagggcgcggacgaggacgagggcgtggacgcggacgtggacgtgggcgaggacgcg

SEQ ID NO: 1013 - DNA, 52 bp, synthetic construct
  misc_feature 1..52: note = Description of Artificial Sequence: Synthetic oligonucleotide
  source 1..52: mol_type = other DNA
tatggctgaaaatcaatattatggtacggggcgccggaagagttcggccgcc

SEQ ID NO: 1014 - DNA, 54 bp, synthetic construct
  misc_feature 1..54: note = Description of Artificial Sequence: Synthetic oligonucleotide
  source 1..54: mol_type = other DNA
gacgggcggccgaactcttccggcgccccgtaccataatattgattttcagcca

SEQ ID NO: 1015 - DNA, 61 bp, synthetic construct
  misc_feature 1..61: note = Description of Artificial Sequence: Synthetic oligonucleotide
  source 1..61: mol_type = other DNA
tatggcagctcagcagaataagcctacacgaagtaaaagaggcgcgcgccggtcgcacgat

SEQ ID NO: 1016 - DNA, 63 bp, synthetic construct
  misc_feature 1..63: note = Description of Artificial Sequence: Synthetic oligonucleotide
  source 1..63: mol_type = other DNA
gacgatcgtgcgaccggcgcgcgcctcttttacttcgtgtaggcttattctgctgagctgcca

SEQ ID NO: 1017 - DNA, 61 bp, synthetic construct
  misc_feature 1..61: note = Description of Artificial Sequence: Synthetic oligonucleotide
  source 1..61: mol_type = other DNA
tatggcaaatgctaagagtgcaaagaaacgggcggcacaaagcgaaaaagctcggaaacat

SEQ ID NO: 1018 - DNA, 63 bp, synthetic construct
  misc_feature 1..63: note = Description of Artificial Sequence: Synthetic oligonucleotide
  source 1..63: mol_type = other DNA
gacgatgtttccgagctttttcgctttgtgccgcccgtttctttgcactcttagcatttgcca

SEQ ID NO: 1019 - DNA, 49 bp, synthetic construct
  misc_feature 1..49: note = Description of Artificial Sequence: Synthetic oligonucleotide
  source 1..49: mol_type = other DNA
tatgtccagcaaagaacagaagactccggaaggtcaagcgccagaggag

SEQ ID NO: 1020 - DNA, 51 bp, synthetic construct
  misc_feature 1..51: note = Description of Artificial Sequence: Synthetic oligonucleotide
  source 1..51: mol_type = other DNA
gacgctcctctggcgcttgaccttccggagtcttctgttctttgctggaca

SEQ ID NO: 1021 - DNA, 61 bp, synthetic construct
  misc_feature 1..61: note = Description of Artificial Sequence: Synthetic oligonucleotide
  source 1..61: mol_type = other DNA
tatggccaaacaaagcgctaaagcccgcgaggcgaaacgtgcagcctctgcggacaaatat

SEQ ID NO: 1022 - DNA, 63 bp, synthetic construct
  misc_feature 1..63: note = Description of Artificial Sequence: Synthetic oligonucleotide
  source 1..63: mol_type = other DNA
gacgatatttgtccgcagaggctgcacgtttcgcctcgcgggctttagcgctttgtttggcca

SEQ ID NO: 1023 - DNA, 61 bp, synthetic construct
  misc_feature 1..61: note = Description of Artificial Sequence: Synthetic oligonucleotide
  source 1..61: mol_type = other DNA
tatggctactgcaaatcaggccgcccgtaaacctcgagcacgaaaggctgctaaatcaaat

SEQ ID NO: 1024 - DNA, 63 bp, synthetic construct
  misc_feature 1..63: note = Description of Artificial Sequence: Synthetic oligonucleotide
  source 1..63: mol_type = other DNA
gacgatttgatttagcagcctttcgtgctcgaggtttacgggcggcctgatttgcagtagcca

SEQ ID NO: 1025 - DNA, 52 bp, synthetic construct
  misc_feature 1..52: note = Description of Artificial Sequence: Synthetic oligonucleotide
  source 1..52: mol_type = other DNA
tatgtccaaagaaaaagccgaacggaccaaacctcatgctaacgctggcacg

SEQ ID NO: 1026 - DNA, 54 bp, synthetic construct
  misc_feature 1..54: note = Description of Artificial Sequence: Synthetic oligonucleotide
  source 1..54: mol_type = other DNA
gacgcgtgccagcgttagcatgaggtttggtccgttcggctttttctttggaca

SEQ ID NO: 1027 - DNA, 61 bp, synthetic construct
  misc_feature 1..61: note = Description of Artificial Sequence: Synthetic oligonucleotide
  source 1..61: mol_type = other DNA
tatgtcagcgtctacggaggcaaccgcaaaagctgctagtgaagcgggccgtgatgcgaat

SEQ ID NO: 1028 - DNA, 63 bp, synthetic construct
  misc_feature 1..63: note = Description of Artificial Sequence: Synthetic oligonucleotide
  source 1..63: mol_type = other DNA
gacgattcgcatcacggcccgcttcactagcagcttttgcggttgcctccgtagacgctgaca

SEQ ID NO: 1029 - DNA, 55 bp, synthetic construct
  misc_feature 1..55: note = Description of Artificial Sequence: Synthetic oligonucleotide
  source 1..55: mol_type = other DNA
tatgagctatactgcaccgagcgcaccgtatgcttatgatgcagccgaacctcac

SEQ ID NO: 1030 - DNA, 57 bp, synthetic construct
  misc_feature 1..57: note = Description of Artificial Sequence: Synthetic oligonucleotide
  source 1..57: mol_type = other DNA
gacggtgaggttcggctgcatcataagcatacggtgcgctcggtgcagtatagctca

SEQ ID NO: 1031 - DNA, 43 bp, synthetic construct
  misc_feature 1..43: note = Description of Artificial Sequence: Synthetic oligonucleotide
  source 1..43: mol_type = other DNA
tatggcaaaccccgaacaggctgaggaacagagagaagaaaca

SEQ ID NO: 1032 - DNA, 45 bp, synthetic construct
  misc_feature 1..45: note = Description of Artificial Sequence: Synthetic oligonucleotide
  source 1..45: mol_type = other DNA
gacgtgtttcttctctctgttcctcagcctgttcggggtttgcca

SEQ ID NO: 1033 - DNA, 61 bp, synthetic construct
  misc_feature 1..61: note = Description of Artificial Sequence: Synthetic oligonucleotide
  source 1..61: mol_type = other DNA
tatggctaatacccctgcgagcgggaacgccaaggcggaagcttacaacagtaatccaagc

SEQ ID NO: 1034 - DNA, 63 bp, synthetic construct
  misc_feature 1..63: note = Description of Artificial Sequence: Synthetic oligonucleotide
  source 1..63: mol_type = other DNA
gacggcttggattactgttgtaagcttccgccttggcgttcccgctcgcaggggtattagcca

SEQ ID NO: 1035 - DNA, 61 bp, synthetic construct
  misc_feature 1..61: note = Description of Artificial Sequence: Synthetic oligonucleotide
  source 1..61: mol_type = other DNA
tatggcaaatacaccggtatcaggcaatttgaaggttgaattctacaacagcaatccttca

SEQ ID NO: 1036 - DNA, 63 bp, synthetic construct
  misc_feature 1..63: note = Description of Artificial Sequence: Synthetic oligonucleotide
  source 1..63: mol_type = other DNA
gacgtgaaggattgctgttgtagaattcaaccttcaaattgcctgataccggtgtatttgcca

SEQ ID NO: 1037 - DNA, 18 bp, synthetic construct
  misc_feature 1..18: note = Description of Artificial Sequence: Synthetic oligonucleotide
  source 1..18: mol_type = other DNA
tcgagcacgggcagccca

SEQ ID NO: 1038 - DNA, 18 bp, synthetic construct
  misc_feature 1..18: note = Description of Artificial Sequence: Synthetic oligonucleotide
  source 1..18: mol_type = other DNA
gacgtgggctgcccgtgc

SEQ ID NO: 1039 - DNA, 51 bp, synthetic construct
  misc_feature 1..51: note = Description of Artificial Sequence: Synthetic oligonucleotide
  source 1..51: mol_type = other DNA
tatgggctgagggtctcacgtccgcgtcctcgcccacgtccacgtccgcgt

SEQ ID NO: 1040 - DNA, 45 bp, synthetic construct
  misc_feature 1..45: note = Description of Artificial Sequence: Synthetic oligonucleotide
  source 1..45: mol_type = other DNA
ggacgtggacgtgggcgaggacgcggacgtgagaccctcagccca

SEQ ID NO: 1041 - DNA, 50 bp, synthetic construct
  misc_feature 1..50: note = Description of Artificial Sequence: Synthetic oligonucleotide
  source 1..50: mol_type = other DNA
ccacgccctcgtcctcgtccgcgccctcgtccgagcgcgtctcgttccgc

SEQ ID NO: 1042 - DNA, 58 bp, synthetic construct
  misc_feature 1..58: note = Description of Artificial Sequence: Synthetic oligonucleotide
  source 1..58: mol_type = other DNA
acctgcggaacgagacgcgctcggacgagggcgcggacgaggacgagggcgtggacgc

SEQ ID NO: 1043 - DNA, 43 bp, synthetic construct
  misc_feature 1..43: note = Description of Artificial Sequence: Synthetic oligonucleotide
  misc_difference 13: note = a, c, t, g, unknown or other
  misc_difference 22: note = a, c, t, g, unknown or other
  source 1..43: mol_type = other DNA
tatgaaaaayccngarcargcngargarcarmgygargaraca

SEQ ID NO: 1044 - DNA, 45 bp, synthetic construct
  misc_feature 1..45: note = Description of Artificial Sequence: Synthetic oligonucleotide
  misc_difference 26: note = a, c, t, g, unknown or other
  misc_difference 35: note = a, c, t, g, unknown or other
  source 1..45: mol_type = other DNA
gacgtgtytcytcrckytgytcytcngcytgytcnggrtttttca

SEQ ID NO: 1045 - DNA, 43 bp, synthetic construct
  misc_feature 1..43: note = Description of Artificial Sequence: Synthetic oligonucleotide
  misc_difference 7: note = a, c, t, g, unknown or other
  misc_difference 13: note = a, c, t, g, unknown or other
  misc_difference 22: note = a, c, t, g, unknown or other
  source 1..43: mol_type = other DNA
tatggcnaayccngarcargcngargarcarmgygargaraca

SEQ ID NO: 1046 - DNA, 45 bp, synthetic construct
  misc_feature 1..45: note = Description of Artificial Sequence: Synthetic oligonucleotide
  misc_difference 26: note = a, c, t, g, unknown or other
  misc_difference 35: note = a, c, t, g, unknown or other
  misc_difference 41: note = a, c, t, g, unknown or other
  source 1..45: mol_type = other DNA
gacgtgtytcytcrckytgytcytcngcytgytcnggrttngcca

SEQ ID NO: 1047 - DNA, 55 bp, synthetic construct
  misc_feature 1..55: note = Description of Artificial Sequence: Synthetic oligonucleotide
  source 1..55: mol_type = other DNA
tatgaaaaacccvgarcargcdgargaacargcdgargaacagmgygaagaraca

SEQ ID NO: 1048 - DNA, 57 bp, synthetic construct
  misc_feature 1..57: note = Description of Artificial Sequence: Synthetic oligonucleotide
  source 1..57: mol_type = other DNA
gacgtgtytcttcrckctgttcytchgcytgttcytchgcytgytcbgggtttttca

SEQ ID NO: 1049 - DNA, 78 bp, synthetic construct
  misc_feature 1..78: note = Description of Artificial Sequence: Synthetic oligonucleotide
  misc_difference 10: note = a, c, t, g, unknown or other
  misc_difference 13: note = a, c, t, g, unknown or other
  misc_difference 16: note = a, c, t, g, unknown or other
  misc_difference 19: note = a, c, t, g, unknown or other
  misc_difference 22: note = a, c, t, g, unknown or other
  misc_difference 25: note = a, c, t, g, unknown or other
  misc_difference 28: note = a, c, t, g, unknown or other
  misc_difference 31: note = a, c, t, g, unknown or other
  misc_difference 34: note = a, c, t, g, unknown or other
  misc_difference 37: note = a, c, t, g, unknown or other
  misc_difference 40: note = a, c, t, g, unknown or other
  misc_difference 43: note = a, c, t, g, unknown or other
  misc_difference 46: note = a, c, t, g, unknown or other
  misc_difference 49: note = a, c, t, g, unknown or other
  misc_difference 52: note = a, c, t, g, unknown or other
  misc_difference 55: note = a, c, t, g, unknown or other
  misc_difference 58: note = a, c, t, g, unknown or other
  misc_difference 61: note = a, c, t, g, unknown or other
  misc_difference 64: note = a, c, t, g, unknown or other
  misc_difference 67: note = a, c, t, g, unknown or other
  misc_difference 70: note = a, c, t, g, unknown or other
  source 1..78: mol_type = other DNA
tatgaraccncgnccncgnccncgnccncgnccncgnccncgnccncgnccncgnccncgnccncgnccngggtctcc

SEQ ID NO: 1050 - DNA, 80 bp, synthetic construct
  misc_feature 1..80: note = Description of Artificial Sequence: Synthetic oligonucleotide
  misc_difference 13: note = a, c, t, g, unknown or other
  misc_difference 16: note = a, c, t, g, unknown or other
  misc_difference 19: note = a, c, t, g, unknown or other
  misc_difference 22: note = a, c, t, g, unknown or other
  misc_difference 25: note = a, c, t, g, unknown or other
  misc_difference 28: note = a, c, t, g, unknown or other
  misc_difference 31: note = a, c, t, g, unknown or other
  misc_difference 34: note = a, c, t, g, unknown or other
  misc_difference 37: note = a, c, t, g, unknown or other
  misc_difference 40: note = a, c, t, g, unknown or other
  misc_difference 43: note = a, c, t, g, unknown or other
  misc_difference 46: note = a, c, t, g, unknown or other
  misc_difference 49: note = a, c, t, g, unknown or other
  misc_difference 52: note = a, c, t, g, unknown or other
  misc_difference 55: note = a, c, t, g, unknown or other
  misc_difference 58: note = a, c, t, g, unknown or other
  misc_difference 61: note = a, c, t, g, unknown or other
  misc_difference 64: note = a, c, t, g, unknown or other
  misc_difference 67: note = a, c, t, g, unknown or other
  misc_difference 70: note = a, c, t, g, unknown or other
  misc_difference 73: note = a, c, t, g, unknown or other
  source 1..80: mol_type = other DNA
acctggagacccnggncgnggncgnggncgnggncgnggncgnggncgnggncgnggncgnggncgnggncgnggtytca

SEQ ID NO: 1051 - DNA, 55 bp, synthetic construct
  misc_feature 1..55: note = Description of Artificial Sequence: Synthetic oligonucleotide
  source 1..55: mol_type = other DNA
tatgaaaaahmmvgarcargcwgargaacargcdgargaacagmgygaagaraca

SEQ ID NO: 1052 - DNA, 57 bp, synthetic construct
  misc_feature 1..57: note = Description of Artificial Sequence: Synthetic oligonucleotide
  source 1..57: mol_type = other DNA
gacgtgtytcttcrckctgttcytchgcytgttcytcwgcytgytcbkkdtttttca

SEQ ID NO: 1053 - DNA, 55 bp, synthetic construct
  misc_feature 1..55: note = Description of Artificial Sequence: Synthetic oligonucleotide
  source 1..55: mol_type = other DNA
tatgaaaaawcamrarmarrmwraaraamaarmdraaraacagmgcgaagaraca

SEQ ID NO: 1054 - DNA, 57 bp, synthetic construct
  misc_feature 1..57: note = Description of Artificial Sequence: Synthetic oligonucleotide
  source 1..57: mol_type = other DNA
gacgtgtytcttcgckctgttyttyhkyttkttyttywkyytkytyktgwtttttca

SEQ ID NO: 1055 - DNA, 55 bp, synthetic construct
  misc_feature 1..55: note = Description of Artificial Sequence: Synthetic oligonucleotide
  source 1..55: mol_type = other DNA
tatgaaaaawcamrarmarrmwraaraamaagcdgaagaacagmgcgaagaraca

SEQ ID NO: 1056 - DNA, 57 bp, synthetic construct
  misc_feature 1..57: note = Description of Artificial Sequence: Synthetic oligonucleotide
  source 1..57: mol_type = other DNA
gacgtgtytcttcgckctgttcttchgcttkttyttywkyytkytyktgwtttttca

SEQ ID NO: 1057 - DNA, 55 bp, synthetic construct
  misc_feature 1..55: note = Description of Artificial Sequence: Synthetic oligonucleotide
  misc_difference 10: note = a, c, t, g, unknown or other
  misc_difference 34: note = a, c, t, g, unknown or other
  source 1..55: mol_type = other DNA
tatgaaaaancmmgaacaagaaraaraamaagcngaagaacarcgygargaraca

SEQ ID NO: 1058 - DNA, 57 bp, synthetic construct
  misc_feature 1..57: note = Description of Artificial Sequence: Synthetic oligonucleotide
  misc_difference 26: note = a, c, t, g, unknown or other
  misc_difference 50: note = a, c, t, g, unknown or other
  source 1..57: mol_type = other DNA
gacgtgtytcytcrcgytgttcttcngcttkttyttyttcttgttckkgntttttca

SEQ ID NO: 1059 - DNA, 55 bp, synthetic construct
  misc_feature 1..55: note = Description of Artificial Sequence: Synthetic oligonucleotide
  misc_difference 10: note = a, c, t, g, unknown or other
  misc_difference 34: note = a, c, t, g, unknown or other
  source 1..55: mol_type = other DNA
tatgaaaaancmmgaacaagaaraaraamaagcngaagaamarmrhrarrarama

SEQ ID NO: 1060 - DNA, 57 bp, synthetic construct
  misc_feature 1..57: note = Description of Artificial Sequence: Synthetic oligonucleotide
  misc_difference 26: note = a, c, t, g, unknown or other
  misc_difference 50: note = a, c, t, g, unknown or other
  source 1..57: mol_type = other DNA
gacgtktytyytydykytkttcttcngcttkttyttyttcttgttckkgntttttca

SEQ ID NO: 1061 - DNA, 67 bp, synthetic construct
  misc_feature 1..67: note = Description of Artificial Sequence: Synthetic oligonucleotide
  misc_difference 46: note = a, c, t, g, unknown or other
  misc_difference 52: note = a, c, t, g, unknown or other
  source 1..67: mol_type = other DNA
tatgaaaaaacaagaacaagaaaaagaacaagcggaagaacaakcnvarkcnvarcgtgaggagaca

SEQ ID NO: 1062 - DNA, 69 bp, synthetic construct
  misc_feature 1..69: note = Description of Artificial Sequence: Synthetic oligonucleotide
  misc_difference 20: note = a, c, t, g, unknown or other
  misc_difference 26: note = a, c, t, g, unknown or other
  source 1..69: mol_type = other DNA
gacgtgtctcctcacgytbngmytbngmttgttcttccgcttgttctttttcttgttcttgttttttca

SEQ ID NO: 1063 - DNA, 79 bp, synthetic construct
  misc_feature 1..79: note = Description of Artificial Sequence: Synthetic oligonucleotide
  source 1..79: mol_type = other DNA
tatgaaaaaacaagaacaagaaaaagaacaagcggaagaacaakcvvaakcvvaakcvvaakcvvaacgtgaggagaca

SEQ ID NO: 1064 - DNA, 81 bp, synthetic construct
  misc_feature 1..81: note = Description of Artificial Sequence: Synthetic oligonucleotide
  source 1..81: mol_type = other DNA
gacgtgtctcctcacgttbbgmttbbgmttbbgmttbbgmttgttcttccgcttgttctttttcttgttcttgttttttca

SEQ ID NO: 1065 - DNA, 67 bp, synthetic construct
  misc_feature 1..67: note = Description of Artificial Sequence: Synthetic oligonucleotide
  misc_difference 44..55: note = a, c, t, g, unknown or other
  source 1..67: mol_type = other DNA
tatgaaaaaacaagaacaagaaaaagaacaagcggaagaacaannnnnnnnnnnncgtgaggagaca

SEQ ID NO: 1066 - DNA, 69 bp, synthetic construct
  misc_feature 1..69: note = Description of Artificial Sequence: Synthetic oligonucleotide
  misc_difference 17..28: note = a, c, t, g, unknown or other
  source 1..69: mol_type = other DNA
gacgtgtctcctcacgnnnnnnnnnnnnttgttcttccgcttgttctttttcttgttcttgttttttca

SEQ ID NO: 1067 - DNA, 42 bp, synthetic construct
  misc_feature 1..42: note = Description of Artificial Sequence: Synthetic oligonucleotide
  misc_difference 12: note = a, c, t, g, unknown or other
  misc_difference 21: note = a, c, t, g, unknown or other
  source 1..42: mol_type = other DNA
atgaaaaayccngarcargcngargarcarmgygargaraca

SEQ ID NO: 1068 - DNA, 42 bp, synthetic construct
  misc_feature 1..42: note = Description of Artificial Sequence: Synthetic oligonucleotide
  misc_difference 6: note = a, c, t, g, unknown or other
  misc_difference 12: note = a, c, t, g, unknown or other
  misc_difference 21: note = a, c, t, g, unknown or other
  source 1..42: mol_type = other DNA
atggcnaayccngarcargcngargarcarmgygargaraca

SEQ ID NO: 1069 - DNA, 54 bp, synthetic construct
  misc_feature 1..54: note = Description of Artificial Sequence: Synthetic oligonucleotide
  source 1..54: mol_type = other DNA
atgaaaaacccvgarcargcdgargaacargcdgargaacagmgygaagaraca

SEQ ID NO: 1070 - protein, 4 aa, synthetic construct
  REGION 1..4: note = Description of Artificial Sequence: Synthetic peptide
AEEQ

SEQ ID NO: 1071 - protein, 22 aa, synthetic construct
  REGION 1..22: note = Description of Artificial Sequence: Synthetic peptide
  MOD_RES 15: note = Ala or Ser
  MOD_RES 16: note = Glu, Lys or Gln
  MOD_RES 17: note = Ala or Ser
  MOD_RES 18: note = Glu, Lys or Gln
MKKQEQEKEQAEEQXXXXREET

SEQ ID NO: 1072 - protein, 26 aa, synthetic construct
  REGION 1..26: note = Description of Artificial Sequence: Synthetic peptide
  MOD_RES 15: note = Ala or Ser
  MOD_RES 16: note = Glu, Lys or Gln
  MOD_RES 17: note = Ala or Ser
  MOD_RES 18: note = Glu, Lys or Gln
  MOD_RES 19: note = Ala or Ser
  MOD_RES 20: note = Glu, Lys or Gln
  MOD_RES 21: note = Ala or Ser
  MOD_RES 22: note = Glu, Lys or Gln
MKKQEQEKEQAEEQXXXXXXXXREET

SEQ ID NO: 1073 - protein, 22 aa, synthetic construct
  REGION 1..22: note = Description of Artificial Sequence: Synthetic peptide
  MOD_RES 15..18: note = Any amino acid
MKKQEQEKEQAEEQXXXXREET

SEQ ID NO: 1074 - protein, 22 aa, synthetic construct
  REGION 1..22: note = Description of Artificial Sequence: Synthetic peptide
MKKQEQEKEQAEEQAESEREET

SEQ ID NO: 1075 - protein, 22 aa, synthetic construct
  REGION 1..22: note = Description of Artificial Sequence: Synthetic peptide
MKKQEQEKEQAEEQAESEREET

SEQ ID NO: 1076 - protein, 22 aa, synthetic construct
  REGION 1..22: note = Description of Artificial Sequence: Synthetic peptide
MKKQEQEKEQAEEQSQSQREET

SEQ ID NO: 1077 - protein, 22 aa, synthetic construct
  REGION 1..22: note = Description of Artificial Sequence: Synthetic peptide
MKKQEQEKEQAEEQSESEREET

SEQ ID NO: 1078 - protein, 26 aa, synthetic construct
  REGION 1..26: note = Description of Artificial Sequence: Synthetic peptide
MKKQEQEKEQAEEQAKAESEAEREET

SEQ ID NO: 1079 - protein, 26 aa, synthetic construct
  REGION 1..26: note = Description of Artificial Sequence: Synthetic peptide
MKKQEQEKEQAEEQSKSQAEAEREET

SEQ ID NO: 1080 - protein, 26 aa, synthetic construct
  REGION 1..26: note = Description of Artificial Sequence: Synthetic peptide
MKKQEQEKEQAEEQAQAQAEDEREET

SEQ ID NO: 1081 - protein, 26 aa, synthetic construct
  REGION 1..26: note = Description of Artificial Sequence: Synthetic peptide
MKKQEQEKEQAEEQSKSKAEDEREET

SEQ ID NO: 1082 - protein, 22 aa, synthetic construct
  REGION 1..22: note = Description of Artificial Sequence: Synthetic peptide
MKKQEQEKEQAEEQPEVQREET

SEQ ID NO: 1083 - protein, 22 aa, synthetic construct
  REGION 1..22: note = Description of Artificial Sequence: Synthetic peptide
MKKQEQEKEQAEEQVENPREET

SEQ ID NO: 1084 - protein, 22 aa, synthetic construct
  REGION 1..22: note = Description of Artificial Sequence: Synthetic peptide
MKKQEQEKEQAEEQELCEREET

SEQ ID NO: 1085 - protein, 22 aa, synthetic construct
  REGION 1..22: note = Description of Artificial Sequence: Synthetic peptide
MKKQEQEKEQAEEQGIDTREET

SEQ ID NO: 1086 - protein, 18 aa, synthetic construct
  REGION 1..18: note = Description of Artificial Sequence: Synthetic peptide
MKNPEQAEEQAEEQREET

SEQ ID NO: 1087 - DNA, 1461 bp, synthetic construct
  misc_feature 1..1461: note = Description of Artificial Sequence: Synthetic polynucleotide
  source 1..1461: mol_type = other DNA
atgaaaaacccagagcaagcagaagaacaagctgaagaacagcgcgaagaaacacgtccgcgtcctcgcccacgtccacgtccgcgtccacgccctcgtcctcgtccgcgccctcgtccgagcgcgtctcgttccgctgggtctccaacggcagaggcagcaggttgtggtacagcagaagcagctccgggtagcgagcctgcaaccagcggttctgagacgccgggcacttccgaatctgcgaccccggagtccggtccaggttcagagccggcgacgagcggttcggaaacgccgggtactgctgaagcggctggttgtggtactgctgaagctgcatcgaccgaaccaagcgaaggttcggcaccgggtactagcgagagcgcaacccctgaaagcggtccgggcagcccggcaggttctccaaccagcaccgaagaaggttcccctgctactgccgaagctgcaggctgcggtactgcggaggcggcgtccccaacttctactgaggaaggtacttctgagtccgctaccccagaaagcggtcctggtacctccactgaaccgtctgaaggctctgcaccaggcacttctgagtctgctactaccgccgaagccgctggttgtggtaccgcagaagctgcatctgagactccaggcacttctgagtccgcaacgcctgaatccggtcctggttctgaaccagctacttccggcagcgaaaccccaggtacctctgagtctgcgactccagagtctggtaccgcggaagcggctggttgtggtactgcagaggcagctggttctccggctggtagcccgaccagcacggaggagggtacgtctgaatctgcaacgccggaatcgggcccaggttcggagcctgcaacgtctggcagcgaaaccccgggtaccacggcggaagcggcaggttgtggcaccgcggaggcagcagctggttctccaacctctaccgaggagggttcaccggcaggtagcccgactagcactgaagaaggtactagcacggagccgagcgagggtagtgctccgggtacgagcgagagcacggcagaagccgctggctgcggtactgctgaagcggcaacccctgagagcggcccaggtacttctgagagcgccactcctgaatccggccctggtagcgagccggcaacctccggctcagaaactcctggttcggaaccagcgaccagcggtaccgctgaagccgcaggttgtggcactgcggaagctgcaaccgaagagggtaccagcacggaaccgagcgagggttctgccccgggtacttccaccgaaccatcggagggctctgcacctggtagcgaacctgcgacgtctggttctgaaacgccgactgcagaagcggctggttgtggcaccgccgaagcagctagcgcctctcgctccgcacatcaccatcaccaccatcatcactaa

SEQ ID NO: 1088 - protein, 486 aa, synthetic construct; identical to SEQ ID NO: 376
  REGION 1..486: note = Description of Artificial Sequence: Synthetic polypeptide

SEQ ID NO: 1089 - DNA, 2757 bp, synthetic construct
  misc_feature 1..2757: note = Description of Artificial Sequence: Synthetic polynucleotide
  source 1..2757: mol_type = other DNA
atgaaaaacccagagcaagcagaagaacaagctgaagaacagcgcgaagaaacacgtccgcgtcctcgcccacgtccacgtccgcgtccacgccctcgtcctcgtccgcgccctcgtccgagcgcgtctcgttccgctgggtctccaggtagcccagctggtagcccaacctctaccgaagaaggtacctctgaatccgctactccagaatccggtcctggtactagcactgagccaagcgaaggttctgctccaggctccccggcaggtagccctacctctaccgaagagggcactagcaccgaaccatctgagggttccgctcctggcacctccactgaaccgtccgaaggcagtgctccgggtacttccgaaagcgcaactccggaatccggccctggttctgagcctgctacttccggctctgaaactccaggtagcgagccagcgacttctggttctgaaactccaggttcaccggcgggtagcccgacgagcacggaggaaggtacctctgagtcggccactcctgagtccggtccgggcacgagcaccgagccgagcgagggttcagccccgggtaccagcacggagccgtccgagggtagcgcaccgggttctccggcgggctcccctacgtctacggaagagggtacgtccactgaacctagcgagggcagcgcgccaggcaccagcactgaaccgagcgaaggcagcgcacctggcactagcgagtctgcgactccggagagcggtccgggtacgagcacggaaccaagcgaaggcagcgccccaggtacctctgaatctgctaccccagaatctggcccgggttccgagccagctacctctggttctgaaaccccaggtacttccactgaaccaagcgaaggtagcgctcctggcacttctactgaaccatccgaaggttccgctcctggtacgtctgaaagcgctacccctgaaagcggcccaggcacctctgaaagcgctactcctgagagcggtccaggctctccagcaggttctccaacctccactgaagaaggcacctctgagtctgctacccctgaatctggtcctggctccgaacctgctacctctggttccgaaactccaggtacctcggaatctgcgactccggaatctggcccgggcacgagcacggagccgtctgagggtagcgcaccaggtaccagcactgagccttctgagggctctgcaccgggtacctccacggaaccttcggaaggttctgcgccgggtacctccactgagccatccgagggttcagcaccaggtactagcacggaaccgtccgagggctctgcaccaggtacgagcaccgaaccgtcggagggtagcgctccaggtagcccagcgggctctccgacaagcaccgaagaaggcaccagcaccgagccgtccgaaggttccgcaccaacggcagaggcagcaggttgtggtacagcagaagcagctccgggtagcgagcctgcaaccagcggttctgagacgccgggcacttccgaatctgcgaccccggagtccggtccaggttcagagccggcgacgagcggttcggaaacgccgggtactgctgaagcggctggttgtggtactgctgaagctgcatcgaccgaaccaagcgaaggttcggcaccgggtactagcgagagcgcaacccctgaaagcggtccgggcagcccggcaggttctccaaccagcaccgaagaaggttcccctgctactgccgaagctgcaggctgcggtactgcggaggcggcgtccccaacttctactgaggaaggtacttctgagtccgctaccccagaaagcggtcctggtacctccactgaaccgtctgaaggctctgcaccaggcacttctgagtctgctactaccgccgaagccgctggttgtggtaccgcagaagctgcatctgagactccaggcacttctgagtccgcaacgcctgaatccggtcctggttctgaaccagctacttccggcagcgaaaccccaggtacctctgagtctgcgactccagagtctggtaccgcggaagcggctggttgtggtactgcagaggcagctggttctccggctggtagcccgaccagcacggaggagggtacgtctgaatctgcaacgccggaatcgggcccaggttcggagcctgcaacgtctggcagcgaaaccccgggtaccacggcggaagcggcaggttgtggcaccgcggaggcagcagctggttctccaacctctaccgaggagggttcaccggcaggtagcccgactagcactgaagaaggtactagcacggagccgagcgagggtagtgctccgggtacgagcgagagcacggcagaagccgctggctgcggtactgctgaagcggcaacccctgagagcggcccaggtacttctgagagcgccactcctgaatccggccctggtagcgagccggcaacctccggctcagaaactcctggttcggaaccagcgaccagcggtaccgctgaagccgcaggttgtggcactgcggaagctgcaaccgaagagggtaccagcacggaaccgagcgagggttctgccccgggtacttccaccgaaccatcggagggctctgcacctggtagcgaacctgcgacgtctggttctgaaacgccgactgcagaagcggctggttgtggcaccgccgaagcagctagcgcctctcgctccgcacatcaccatcaccaccatcatcactaa

SEQ ID NO: 1090 - protein, 918 aa, synthetic construct; identical to SEQ ID NO: 377
  REGION 1..918: note = Description of Artificial Sequence: Synthetic polypeptide

SEQ ID NO: 1091 - protein, 34 aa, synthetic construct
  REGION 1..34: note = Description of Artificial Sequence: Synthetic polypeptide
MKIKTGARILALSALTTMMFSASALAAPTTAGAG

SEQ ID NO: 1092 - protein, 9 aa, synthetic construct
  REGION 1..9: note = Description of Artificial Sequence: Synthetic peptide
RHHHHHHHH

SEQ ID NO: 1093 - protein, 26 aa, synthetic construct
  REGION 1..26: note = Description of Artificial Sequence: Synthetic peptide
MKIKTGARILALSALTTMMFSASALA

SEQ ID NO: 1094 - protein, 8 aa, synthetic construct
  REGION 1..8: note = Description of Artificial Sequence: Synthetic peptide
APTTAGAG

SEQ ID NO: 1095 - protein, 12 aa, synthetic construct
  REGION 1..12: note = Description of Artificial Sequence: Synthetic peptide
RPRPRPRPRPGR

SEQ ID NO: 1096 - protein, 16 aa, synthetic construct
  REGION 1..16: note = Description of Artificial Sequence: Synthetic peptide
RPRPRPRPRPRPRPGR

SEQ ID NO: 1097 - protein, 12 aa, synthetic construct
  REGION 1..12: note = Description of Artificial Sequence: Synthetic peptide
KPKPKPKPKPGR

SEQ ID NO: 1098 - protein, 20 aa, synthetic construct
  REGION 1..20: note = Description of Artificial Sequence: Synthetic peptide
RPRPRPRPRPRPRPRPRPGR

SEQ ID NO: 1099 - protein, 24 aa, synthetic construct
  REGION 1..24: note = Description of Artificial Sequence: Synthetic peptide
RPRPRPRPRPRPRPRPRPRPRPGR

SEQ ID NO: 1100 - protein, 20 aa, synthetic construct
  REGION 1..20: note = Description of Artificial Sequence: Synthetic peptide
RPRPKPRPKPRPKPRPKPGR

SEQ ID NO: 1101 - protein, 24 aa, synthetic construct
  REGION 1..24: note = Description of Artificial Sequence: Synthetic peptide
RPRPKPRPKPRPKPRPKPRPKPGR

SEQ ID NO: 1102 - protein, 10 aa, synthetic construct
  REGION 1..10: note = Description of Artificial Sequence: Synthetic peptide
  MOD_RES 1: note = pyro-Glu
  MOD_RES 6: note = D-Lys
  REGION 1..10: note = C-term NH2
EHWSYKLRPG

SEQ ID NO: 1103 - protein, 36 aa, synthetic construct; identical to SEQ ID NO: 705
  REGION 1..36: note = Description of Artificial Sequence: Synthetic polypeptide

SEQ ID NO: 1104 - protein, 36 aa, synthetic construct; identical to SEQ ID NO: 706
  REGION 1..36: note = Description of Artificial Sequence: Synthetic polypeptide

SEQ ID NO: 1105 - protein, 36 aa, synthetic construct; identical to SEQ ID NO: 883
  REGION 1..36: note = Description of Artificial Sequence: Synthetic polypeptide

SEQ ID NO: 1106 - protein, 36 aa, synthetic construct; identical to SEQ ID NO: 884
  REGION 1..36: note = Description of Artificial Sequence: Synthetic polypeptide

SEQ ID NO: 1107 - protein, 42 aa, synthetic construct; identical to SEQ ID NO: 57
  REGION 1..42: note = Description of Artificial Sequence: Synthetic polypeptide

SEQ ID NO: 1108 - protein, 42 aa, synthetic construct; identical to SEQ ID NO: 57
  REGION 1..42: note = Description of Artificial Sequence: Synthetic polypeptide

SEQ ID NO: 1109 - protein, 42 aa, synthetic construct; identical to SEQ ID NO: 60
  REGION 1..42: note = Description of Artificial Sequence: Synthetic polypeptide

SEQ ID NO: 1110 - protein, 42 aa, synthetic construct; identical to SEQ ID NO: 61
  REGION 1..42: note = Description of Artificial Sequence: Synthetic polypeptide

SEQ ID NO: 1111 - protein, 144 aa, synthetic construct; identical to SEQ ID NO: 66
  REGION 1..144: note = Description of Artificial Sequence: Synthetic polypeptide

SEQ ID NO: 1112 - protein, 144 aa, synthetic construct; identical to SEQ ID NO: 78
  REGION 1..144: note = Description of Artificial Sequence: Synthetic polypeptide

SEQ ID NO: 1113 - protein, 288 aa, synthetic construct; identical to SEQ ID NO: 85
  REGION 1..288: note = Description of Artificial Sequence: Synthetic polypeptide

SEQ ID NO: 1114 - protein, 288 aa, synthetic construct; identical to SEQ ID NO: 88
  REGION 1..288: note = Description of Artificial Sequence: Synthetic polypeptide

SEQ ID NO: 1115 - protein, 504 aa, synthetic construct
  REGION 1..504: note = Description of Artificial Sequence: Synthetic polypeptide
GASPGTSSTGSPGSSPSASTGTGPGSSPSASTGTGPGTPGSGTASSSPGSSTPSGATGSPGSNPSASTGTGPGASPGTSSTGSPGTPGSGTASSSPGSSTPSGATGSPGTPGSGTASSSPGASPGTSSTGSPGASPGTSSTGSPGTPGSGTASSSPGSSTPSGATGSPGASPGTSSTGSPGTPGSGTASSSPGSSTPSGATGSPGSNPSASTGTGPGSSPSASTGTGPGSSTPSGATGSPGSSTPSGATGSPGASPGTSSTGSPGASPGTSSTGSPGASPGTSSTGSPGTPGSGTASSSPGASPGTSSTGSPGASPGTSSTGSPGASPGTSSTGSPGSSPSASTGTGPGTPGSGTASSSPGASPGTSSTGSPGASPGTSSTGSPGASPGTSSTGSPGSSTPSGATGSPGSSTPSGATGSPGASPGTSSTGSPGTPGSGTASSSPGSSTPSGATGSPGSSTPSGATGSPGSSTPSGATGSPGSSPSASTGTGPGASPGTSSTGSP

SEQ ID NO: 1116 - protein, 576 aa, synthetic construct; identical to SEQ ID NO: 91
  REGION 1..576: note = Description of Artificial Sequence: Synthetic polypeptide

SEQ ID NO: 1117 - protein, 576 aa, synthetic construct; identical to SEQ ID NO: 92
  REGION 1..576: note = Description of Artificial Sequence: Synthetic polypeptide

SEQ ID NO: 1118 - protein, 576 aa, synthetic construct; identical to SEQ ID NO: 94
  REGION 1..576: note = Description of Artificial Sequence: Synthetic polypeptide

SEQ ID NO: 1119 - protein, 540 aa, synthetic construct; identical to SEQ ID NO: 90
  REGION 1..540: note = Description of Artificial Sequence: Synthetic polypeptide

SEQ ID NO: 1120 - protein, 836 aa, synthetic construct; identical to SEQ ID NO: 96
  REGION 1..836: note = Description of Artificial Sequence: Synthetic polypeptide

SEQ ID NO: 1121 - protein, 864 aa, synthetic construct; identical to SEQ ID NO: 97
  REGION 1..864: note = Description of Artificial Sequence: Synthetic polypeptide

SEQ ID NO: 1122 - protein, 875 aa, synthetic construct; identical to SEQ ID NO: 98
  REGION 1..875: note = Description of Artificial Sequence: Synthetic polypeptide
  MOD_RES 430..432: note = Any amino acid
  MOD_RES 443..446: note = Any amino acid

SEQ ID NO: 1123 - protein, 864 aa, synthetic construct; identical to SEQ ID NO: 99
  REGION 1..864: note = Description of Artificial Sequence: Synthetic polypeptide

SEQ ID NO: 1124 - protein, 875 aa, synthetic construct; identical to SEQ ID NO: 100
  REGION 1..875: note = Description of Artificial Sequence: Synthetic polypeptide

SEQ ID NO: 1125 - protein, 1318 aa, synthetic construct; identical to SEQ ID NO: 101
  REGION 1..1318: note = Description of Artificial Sequence: Synthetic polypeptide

SEQ ID NO: 1126 - protein, 924 aa, synthetic construct
  REGION 1..924: note = Description of Artificial Sequence: Synthetic polypeptide
MAEPAGSPTSTEEGASPGTSSTGSPGSSTPSGATGSPGSSTPSGATGSPGTSTEPSEGSAPGSEPATSGSETPGSPAGSPTSTEEGSTSSTAESPGPGTSTPESGSASPGSTSESPSGTAPGSTSESPSGTAPGTSTPESGSASPGTSTPESGSASPGSEPATSGSETPGTSESATPESGPGSPAGSPTSTEEGTSTEPSEGSAPGTSESATPESGPGTSTEPSEGSAPGTSTEPSEGSAPGSPAGSPTSTEEGTSTEPSEGSAPGTSTEPSEGSAPGTSESATPESGPGTSESATPESGPGTSTEPSEGSAPGTSTEPSEGSAPGTSESATPESGPGTSTEPSEGSAPGSEPATSGSETPGSPAGSPTSTEEGSSTPSGATGSPGTPGSGTASSSPGSSTPSGATGSPGTSTEPSEGSAPGTSTEPSEGSAPGSEPATSGSETPGSPAGSPTSTEEGSPAGSPTSTEEGTSTEPSEGSAPGASASGAPSTGGTSESATPESGPGSPAGSPTSTEEGSPAGSPTSTEEGSTSSTAESPGPGSTSESPSGTAPGTSPSGESSTAPGTPGSGTASSSPGSSTPSGATGSPGSSPSASTGTGPGSEPATSGSETPGTSESATPESGPGSEPATSGSETPGSTSSTAESPGPGSTSSTAESPGPGTSPSGESSTAPGSEPATSGSETPGSEPATSGSETPGTSTEPSEGSAPGSTSSTAESPGPGTSTPESGSASPGSTSESPSGTAPGTSTEPSEGSAPGTSTEPSEGSAPGTSTEPSEGSAPGSSTPSGATGSPGSSPSASTGTGPGASPGTSSTGSPGSEPATSGSETPGTSESATPESGPGSPAGSPTSTEEGSSTPSGATGSPGSSPSASTGTGPGASPGTSSTGSPGTSESATPESGPGTSTEPSEGSAPGTSTEPSEGSAP

SEQ ID NO: 1127 - protein, 913 aa, synthetic construct
  REGION 1..913: note = Description of Artificial Sequence: Synthetic polypeptide
MAEPAGSPTSTEEGTPGSGTASSSPGSSTPSGATGSPGASPGTSSTGSPGSPAGSPTSTEEGTSESATPESGPGTSTEPSEGSAPGSPAGSPTSTEEGTSTEPSEGSAPGTSTEPSEGSAPGTSESATPESGPGSEPATSGSETPGSEPATSGSETPGSPAGSPTSTEEGTSESATPESGPGTSTEPSEGSAPGTSTEPSEGSAPGSPAGSPTSTEEGTSTEPSEGSAPGTSTEPSEGSAPGTSESATPESGPGTSTEPSEGSAPGTSESATPESGPGSEPATSGSETPGTSTEPSEGSAPGTSTEPSEGSAPGTSESATPESGPGTSESATPESGPGSPAGSPTSTEEGTSESATPESGPGSEPATSGSETPGTSESATPESGPGTSTEPSEGSAPGTSTEPSEGSAPGTSTEPSEGSAPGTSTEPSEGSAPGTSTEPSEGSAPGTSTEPSEGSAPGSPAGSPTSTEEGTSTEPSEGSAPGTSESATPESGPGSEPATSGSETPGTSESATPESGPGSEPATSGSETPGTSESATPESGPGTSTEPSEGSAPGTSESATPESGPGSPAGSPTSTEEGSPAGSPTSTEEGSPAGSPTSTEEGTSESATPESGPGTSTEPSEGSAPGTSESATPESGPGSEPATSGSETPGTSESATPESGPGSEPATSGSETPGTSESATPESGPGTSTEPSEGSAPGSPAGSPTSTEEGTSESATPESGPGSEPATSGSETPGTSESATPESGPGSPAGSPTSTEEGSPAGSPTSTEEGTSTEPSEGSAPGTSESATPESGPGTSESATPESGPGTSESATPESGPGSEPATSGSETPGSEPATSGSETPGSPAGSPTSTEEGTSTEPSEGSAPGTSTEPSEGSAPGSEPATSGSETPGTSESATPESGPGTSTEPSEGSAP

SEQ ID NO: 1128 - protein, 864 aa, synthetic construct; identical to SEQ ID NO: 102
  REGION 1..864: note = Description of Artificial Sequence: Synthetic polypeptide

SEQ ID NO: 1129 - protein, 4 aa, synthetic construct
  REGION 1..4: note = Description of Artificial Sequence: Synthetic peptide
GGSG

SEQ ID NO: 1130 - protein, 288 aa, synthetic construct
  REGION 1..288: note = Description of Artificial Sequence: Synthetic polypeptide
GSGGEGGSGGEGGSGGEGGSGGEGGSGGEGGSGGEGGSGGEGGSGGEGGSGGEGGSGGEGGSGGEGGSGGEGGSGGEGGSGGEGGSGGEGGSGGEGGSGGEGGSGGEGGSGGEGGSGGEGGSGGEGGSGGEGGSGGEGGSGGEGGSGGEGGSGGEGGSGGEGGSGGEGGSGGEGGSGGEGGSGGEGGSGGEGGSGGEGGSGGEGGSGGEGGSGGEGGSGGEGGSGGEGGSGGEGGSGGEGGSGGEGGSGGEGGSGGEGGSGGEGGSGGEGGSGGEGGSGGEGGSGGEG

SEQ ID NO: 1131 - protein, 288 aa, synthetic construct
  REGION 1..288: note = Description of Artificial Sequence: Synthetic polypeptide
GEGEGGGEGGEGEGGGEGGEGEGGGEGGEGEGGGEGGEGEGGGEGGEGEGGGEGGEGEGGGEGGEGEGGGEGGEGEGGGEGGEGEGGGEGGEGEGGGEGGEGEGGGEGGEGEGGGEGGEGEGGGEGGEGEGGGEGGEGEGGGEGGEGEGGGEGGEGEGGGEGGEGEGGGEGGEGEGGGEGGEGEGGGEGGEGEGGGEGGEGEGGGEGGEGEGGGEGGEGEGGGEGGEGEGGGEGGEGEGGGEGGEGEGGGEGGEGEGGGEGGEGEGGGEGGEGEGGGEGGEGEGGGEG

SEQ ID NO: 1132 - protein, 288 aa, synthetic construct
  REGION 1..288: note = Description of Artificial Sequence: Synthetic polypeptide
SSESSESSSSESSSESSESSSSESSSESSESSSSESSSESSESSSSESSSESSESSSSESSSESSESSSSESSSESSESSSSESSSESSESSSSESSSESSESSSSESSSESSESSSSESSSESSESSSSESSSESSESSSSESSSESSESSSSESSSESSESSSSESSSESSESSSSESSSESSESSSSESSSESSESSSSESSSESSESSSSESSSESSESSSSESSSESSESSSSESSSESSESSSSESSSESSESSSSESSSESSESSSSESSSESSESSSSES

SEQ ID NO: 1133 - protein, 288 aa, synthetic construct
  REGION 1..288: note = Description of Artificial Sequence: Synthetic polypeptide
GEGSGEGSEGEGSEGSGEGEGSEGSGEGEGGSEGSEGEGGSEGSEGEGGSEGSEGEGSGEGSEGEGGSEGSEGEGSGEGSEGEGSEGGSEGEGGSEGSEGEGSGEGSEGEGGEGGSEGEGSEGSGEGEGSGEGSEGEGSEGSGEGEGSGEGSEGEGSEGSGEGEGSEGSGEGEGGSEGSEGEGSEGSGEGEGGEGSGEGEGSGEGSEGEGGGEGSEGEGSGEGGEGEGSEGGSEGEGGSEGGEGEGSEGSGEGEGSEGGSEGEGSEGGSEGEGSEGSGEGEGSEGSGE

SEQ ID NO: 1134 - protein, 576 aa, synthetic construct
  REGION 1..576: note = Description of Artificial Sequence: Synthetic polypeptide
GGKPGEGGKPEGGGGKPGGKPEGEGEGKPGGKPEGGGKPGGGEGGKPEGGKPEGEGKPGGGEGKPGGKPEGGGGKPEGEGKPGGGGGKPGGKPEGEGKPGGGEGGKPEGKPGEGGEGKPGGKPEGGGEGKPGGGKPGEGGKPGEGKPGGGEGGKPEGGKPEGEGKPGGGEGKPGGKPGEGGKPEGGGEGKPGGKPGEGGEGKPGGGKPEGEGKPGGGKPGGGEGGKPEGEGKPGGKPEGGGEGKPGGKPEGGGKPEGGGEGKPGGGKPGEGGKPGEGEGKPGGKPEGEGKPGGEGGGKPEGKPGGGEGGKPEGGKPGEGGKPEGGKPGEGGEGKPGGGKPGEGGKPEGGGKPEGEGKPGGGGKPGEGGKPEGGKPEGGGEGKPGGGKPEGEGKPGGGEGKPGGKPEGGGGKPGEGGKPEGGKPGGEGGGKPEGEGKPGGKPGEGGGGKPGGKPEGEGKPGEGGEGKPGGKPEGGGEGKPGGKPEGGGEGKPGGGKPGEGGKPEGGGKPGEGGKPGEGGKPEGEGKPGGGEGKPGGKPGEGGKPEGGGEGKPGGKPGGEGGGKPEGGKPGEGGKPEG

SEQ ID NO: 1135 - protein, 558 aa, synthetic construct
  REGION 1..558: note = Description of Artificial Sequence: Synthetic polypeptide
GEGKPGGKPGSGGGKPGEGGKPGSGEGKPGGKPGSGGSGKPGGKPGEGGKPEGGSGGKPGGGGKPGGKPGGEGSGKPGGKPEGGGKPEGGSGGKPGGKPEGGSGGKPGGKPGSGEGGKPGGGKPGGEGKPGSGKPGGEGSGKPGGKPEGGSGGKPGGKPEGGSGGKPGGSGKPGGKPGEGGKPEGGSGGKPGGSGKPGGKPEGGGSGKPGGKPGEGGKPGSGEGGKPGGGKPGGEGKPGSGKPGGEGSGKPGGKPGSGGEGKPGGKPEGGSGGKPGGGKPGGEGKPGSGGKPGEGGKPGSGGGKPGGKPGGEGEGKPGGKPGEGGKPGGEGSGKPGGGGKPGGKPGGEGGKPEGSGKPGGGSGKPGGKPEGGGGKPEGSGKPGGGGKPEGSGKPGGGKPEGGSGGKPGGSGKPGGKPGEGGGKPEGSGKPGGGSGKPGGKPEGGGKPEGGSGGKPGGKPEGGSGGKPGGKPGGEGSGKPGGKPGSGEGGKPGGKPGEGSGGKPGGKPEGGSGGKPGGSGKPGGKPEGGGSGKPGGKPGEGGKPGGEGSGKPGGSGKPG

SEQ ID NO: 1136 - protein, 577 aa, synthetic construct
  REGION 1..577: note = Description of Artificial Sequence: Synthetic polypeptide
GGSGKPGKPGGSGSGKPGSGKPGGGSGKPGSGKPGGGSGKPGSGKPGGGSGKPGSGKPGGGGKPGSGSGKPGGGKPGGSGGKPGGGSGKPGKPGSGGSGKPGSGKPGGGSGGKPGKPGSGGSGGKPGKPGSGGGSGKPGKPGSGGSGGKPGKPGSGGSGGKPGKPGSGGSGKPGSGKPGGGSGKPGSGKPGSGGSGKPGKPGSGGSGKPGSGKPGSGSGKPGSGKPGGGSGKPGSGKPGSGGSGKPGKPGSGGGKPGSGSGKPGGGKPGSGSGKPGGGKPGGSGGKPGGSGGKPGKPGSGGGSGKPGKPGSGGGSGKPGKPGGSGSGKPGSGKPGGGSGKPGSGKPGSGGSGKPGKPGSGGSGGKPGKPGSGGGKPGSGSGKPGGGKPGSGSGKPGGGKPGSGSGKPGGGKPGSGSGKPGGSGKPGSGKPGGGSGGKPGKPGSGGSGKPGSGKPGSGGSGKPGKPGGSGSGKPGSGKPGGGSGKPGSGKPGGGSGKPGSGKPGGGSGKPGSGKPGGGGKPGSGSGKPGGSGGKPGKPGSGGSGGKPGKPGSGGSGKPGSGKPGGGSGGKPGKPGSGG

SEQ ID NO: 1137 - protein, 576 aa, synthetic construct
  REGION 1..576: note = Description of Artificial Sequence: Synthetic polypeptide
GEGSGEGSEGEGSEGSGEGEGSEGSGEGEGGSEGSEGEGSEGSGEGEGGEGSGEGEGSGEGSEGEGGGEGSEGEGSGEGGEGEGSEGGSEGEGGSEGGEGEGSEGSGEGEGSEGGSEGEGSEGGSEGEGSEGSGEGEGSEGSGEGEGSEGSGEGEGSEGSGEGEGSEGGSEGEGGSEGSEGEGSGEGSEGEGGSEGSEGEGGGEGSEGEGSGEGSEGEGGSEGSEGEGGSEGSEGEGGEGSGEGEGSEGSGEGEGSGEGSEGEGSEGSGEGEGSEGSGEGEGGSEGSEGEGSGEGSEGEGSEGSGEGEGSEGSGEGEGGSEGSEGEGGSEGSEGEGGSEGSEGEGGEGSGEGEGSEGSGEGEGSGEGSEGEGSEGSGEGEGSEGSGEGEGGSEGSEGEGSEGSGEGEGGEGSGEGEGSGEGSEGEGGGEGSEGEGSEGSGEGEGSEGSGEGEGSEGGSEGEGGSEGSEGEGSEGGSEGEGSEGGSEGEGSEGSGEGEGSEGSGEGEGSGEGSEGEGGSEGGEGEGSEGGSEGEGSEGGSEGEGGEGSGEGEGGGEGSEGEGSEGSGEGEGSGEGSE

SEQ ID NO: 1138 - protein, 576 aa, synthetic construct; identical to SEQ ID NO: 91
  REGION 1..576: note = Description of Artificial Sequence: Synthetic polypeptide

SEQ ID NO: 1139 - protein, 577 aa, synthetic construct
  REGION 1..577: note = Description of Artificial Sequence: Synthetic polypeptide
AGSPAGSPTSTEEGTSESATPESGPGTSTEPSEGSAPGSPAGSPTSTEEGTSTEPSEGSAPGTSTEPSEGSAPGTSESATPESGPGSEPATSGSETPGSEPATSGSETPGSPAGSPTSTEEGTSESATPESGPGTSTEPSEGSAPGTSTEPSEGSAPGSPAGSPTSTEEGTSTEPSEGSAPGTSTEPSEGSAPGTSESATPESGPGTSTEPSEGSAPGTSESATPESGPGSEPATSGSETPGTSTEPSEGSAPGTSTEPSEGSAPGTSESATPESGPGTSESATPESGPGSPAGSPTSTEEGTSESATPESGPGSEPATSGSETPGTSESATPESGPGTSTEPSEGSAPGTSTEPSEGSAPGTSTEPSEGSAPGTSTEPSEGSAPGTSTEPSEGSAPGTSTEPSEGSAPGSPAGSPTSTEEGTSTEPSEGSAPGTSESATPESGPGSEPATSGSETPGTSESATPESGPGSEPATSGSETPGTSESATPESGPGTSTEPSEGSAPGTSESATPESGPGSPAGSPTSTEEGSPAGSPTSTEEGSPAGSPTSTEEGTSESATPESGPGTSTEPSEGSAP

SEQ ID NO: 1140 - protein, 540 aa, synthetic construct; identical to SEQ ID NO: 90
  REGION 1..540: note = Description of Artificial Sequence: Synthetic polypeptide

SEQ ID NO: 1141 - protein, 504 aa, synthetic construct; identical to SEQ ID NO: 1115
  REGION 1..504: note = Description of Artificial Sequence: Synthetic polypeptide

SEQ ID NO: 1142 - protein, 816 aa, synthetic construct
  REGION 1..816: note = Description of Artificial Sequence: Synthetic polypeptide
GSPAGSPTSTEEGTSESATPESGPGTSTEPSEGSAPGSPAGSPTSTEEGTSTEPSEGSAPGTSTEPSEGSAPGTSESATPESGPGSEPATSGSETPGSEPATSGSETPGSPAGSPTSTEEGTSESATPESGPGTSTEPSEGSAPGTSTEPSEGSAPGSPAGSPTSTEEGTSTEPSEGSAPGTSTEPSEGSAPGTSESATPESGPGTSTEPSEGSAPGTSESATPESGPGSEPATSGSETPGTSTEPSEGSAPGTSTEPSEGSAPGTSESATPESGPGTSESATPESGPGSPAGSPTSTEEGTSESATPESGPGSEPATSGSETPGTSESATPESGPGTSTEPSEGSAPGTSTEPSEGSAPGTSTEPSEGSAPGTSTEPSEGSAPGTSTEPSEGSAPGTSTEPSEGSAPGSPAGSPTSTEEGTSTEPSEGSAPGTSESATPESGPGSEPATSGSETPGTSESATPESGPGSEPATSGSETPGTSESATPESGPGTSTEPSEGSAPGTSESATPESGPGSPAGSPTSTEEGSPAGSPTSTEEGSPAGSPTSTEEGTSESATPESGPGTSTEPSEGSAPGTSESATPESGPGSEPATSGSETPGTSESATPESGPGSEPATSGSETPGTSESATPESGPGTSTEPSEGSAPGSPAGSPTSTEEGTSESATPESGPGSEPATSGSETPGTSESATPESGPGSPAGSPTSTEEGSPAGSPTSTEEGTSTEPSEGSAPGTSESATPESGPGTSESATPESGPGTSESATPESGPGSEPATSGSETPGSEPATSGSETPGSPAGSPTSTEEGTSTEPSEGSAP

SEQ ID NO: 1143 - protein, 875 aa, synthetic construct; identical to SEQ ID NO: 98
  REGION 1..875: note = Description of Artificial Sequence: Synthetic polypeptide
  MOD_RES 430..432: note = Any amino acid
  MOD_RES 443..446: note = Any amino acid

SEQ ID NO: 1144 - protein, 868 aa, synthetic construct
  REGION 1..868: note = Description of Artificial Sequence: Synthetic polypeptide
GGSPGASPGTSSTGSPGSSPSASTGTGPGSSPSASTGTGPGTPGSGTASSSPGSSTPSGATGSPGSNPSASTGTGPGASPGTSSTGSPGTPGSGTASSSPGSSTPSGATGSPGTPGSGTASSSPGASPGTSSTGSPGASPGTSSTGSPGTPGSGTASSSPGSSTPSGATGSPGASPGTSSTGSPGTPGSGTASSSPGSSTPSGATGSPGSNPSASTGTGPGSSPSASTGTGPGSSTPSGATGSPGSSTPSGATGSPGASPGTSSTGSPGASPGTSSTGSPGASPGTSSTGSPGTPGSGTASSSPGASPGTSSTGSPGASPGTSSTGSPGASPGTSSTGSPGSSPSASTGTGPGTPGSGTASSSPGASPGTSSTGSPGASPGTSSTGSPGASPGTSSTGSPGSSTPSGATGSPGSSTPSGATGSPGASPGTSSTGSPGTPGSGTASSSPGSSTPSGATGSPGSSTPSGATGSPGSSTPSGATGSPGSSPSASTGTGPGASPGTSSTGSPGASPGTSSTGSPGTPGSGTASSSPGASPGTSSTGSPGASPGTSSTGSPGASPGTSSTGSPGASPGTSSTGSPGTPGSGTASSSPGSSTPSGATGSPGTPGSGTASSSPGSSTPSGATGSPGTPGSGTASSSPGSSTPSGATGSPGSSTPSGATGSPGSSPSASTGTGPGSSPSASTGTGPGASPGTSSTGSPGTPGSGTASSSPGSSTPSGATGSPGSSPSASTGTGPGSSPSASTGTGPGASPGTSSTGSPGASPGTSSTGSPGSSTPSGATGSPGSSPSASTGTGPGASPGTSSTGSPGSSPSASTGTGPGTPGSGTASSSPGSSTPSGATGSPGSSTPSGATGSPGASPGTSSTGSP

SEQ ID NO: 1145 - protein, 875 aa, synthetic construct; identical to SEQ ID NO: 100
  REGION 1..875: note = Description of Artificial Sequence: Synthetic polypeptide

SEQ ID NO: 1146 - protein, 1318 aa, synthetic construct; identical to SEQ ID NO: 101
  REGION 1..1318: note = Description of Artificial Sequence: Synthetic polypeptide

SEQ ID NO: 1147 - protein, 9 aa, synthetic construct
  REGION 1..9: note = Description of Artificial Sequence: Synthetic peptide
FDKLPRTSG

SEQ ID NO: 1148 - protein, 7 aa, synthetic construct
  REGION 1..7: note = Description of Artificial Sequence: Synthetic peptide
FKLMVWY

SEQ ID NO: 1149 - protein, 909 aa, synthetic construct
  REGION 1..909: note = Description of Artificial Sequence: Synthetic polypeptide
APTTAGAGRPRPRPRPRPRPRPRPRPRPRPGRGSPGSPAGSPTSTEEGTSESATPESGPGTSTEPSEGSAPGSPAGSPTSTEEGTSTEPSEGSAPGTSTEPSEGSAPGTSESATPESGPGSEPATSGSETPGSEPATSGSETPGSPAGSPTSTEEGTSESATPESGPGTSTEPSEGSAPGTSTEPSEGSAPGSPAGSPTSTEEGTSTEPSEGSAPGTSTEPSEGSAPGTSESATPESGPGTSTEPSEGSAPGTSESATPESGPGSEPATSGSETPGTSTEPSEGSAPGTSTEPSEGSAPGTSESATPESGPGTSESATPESGPGSPAGSPTSTEEGTSESATPESGPGSEPATSGSETPGTSESATPESGPGTSTEPSEGSAPGTSTEPSEGSAPGTSTEPSEGSAPGTSTEPSEGSAPGTSTEPSEGSAPGTSTEPSEGSAPGSPAGSPTSTEEGTSTEPSEGSAPGTSESATPESGPGSEPATSGSETPGTSESATPESGPGSEPATSGSETPGTSESATPESGPGTSTEPSEGSAPGTSESATPESGPGSPAGSPTSTEEGSPAGSPTSTEEGSPAGSPTSTEEGTSESATPESGPGTSTEPSEGSAPGTSESATPESGPGSEPATSGSETPGTSESATPESGPGSEPATSGSETPGTSESATPESGPGTSTEPSEGSAPGSPAGSPTSTEEGTSESATPESGPGSEPATSGSETPGTSESATPESGPGSPAGSPTSTEEGSPAGSPTSTEEGTSTEPSEGSAPGTSESATPESGPGTSESATPESGPGTSESATPESGPGSEPATSGSETPGSEPATSGSETPGSPAGSPTSTEEGTSTEPSEGSAPGTSTEPSEGSAPGSEPATSGSETPGTSESATPESGPGTSTEPSEGSAPGRHHHHHHHH

SEQ ID NO: 1150 - protein, 1068 aa, synthetic construct
  REGION 1..1068: note = Description of Artificial Sequence: Synthetic polypeptide
ANTPVSGNLKVEFYNSNPSDTTNSINPQFKVTNTGSSAIDLSKLTLRYYYTVDGQKDQTFWADHAAIIGSNGSYNGITSNVKGTFVKMSSSTNNADTYLEISFTGGTLEPGAHVQIQGRFAKNDWSNYTQSNDYSFKSASQFVEWDQVTAYLNGVLVWGKEPGGSVVGSGSGSGRGSPGSPAGSPTSTEEGTSESATPESGPGTSTEPSEGSAPGSPAGSPTSTEEGTSTEPSEGSAPGTSTEPSEGSAPGTSESATPESGPGSEPATSGSETPGSEPATSGSETPGSPAGSPTSTEEGTSESATPESGPGTSTEPSEGSAPGTSTEPSEGSAPGSPAGSPTSTEEGTSTEPSEGSAPGTSTEPSEGSAPGTSESATPESGPGTSTEPSEGSAPGTSESATPESGPGSEPATSGSETPGTSTEPSEGSAPGTSTEPSEGSAPGTSESATPESGPGTSESATPESGPGSPAGSPTSTEEGTSESATPESGPGSEPATSGSETPGTSESATPESGPGTSTEPSEGSAPGTSTEPSEGSAPGTSTEPSEGSAPGTSTEPSEGSAPGTSTEPSEGSAPGTSTEPSEGSAPGSPAGSPTSTEEGTSTEPSEGSAPTAEAAGKPGTAEAAGTSESATPESGPGSEPATSGSETPGTSESATPESGPGSEPATSGSETPGTSESATPESGPGTSTEPSEGSAPGTSESATPESGPGSPAGSPTSTEEGSPAGSPTSTEEGSPAGSPTSTEEGTSESATPESGPGTSTEPSEGSAPGTSESATPESGPGSEPATSGSETPGTSESATPESGPGSEPATSGSETPGTSESATPESGPGTSTEPSEGSAPGSPAGSPTSTEEGTSESATPESGPGSEPATSGSETPGTSESATPESGPGSPAGSPTSTEEGSPAGSPTSTEEGTSTEPSEGSAPGTSESATPESGPGTSESATPESGPGTSESATPESGPGSEPATSGSETPGSEPATSGSETPGSPAGSPTSTEEGTSTEPSEGSAPGTSTEPSEGSAPGSEPATSGSETPGTSESATPESGPGTSTEPSEGSAPGKATHHHHHHHH

SEQ ID NO: 1151 - protein, 939 aa, synthetic construct
  REGION 1..939: note = Description of Artificial Sequence: Synthetic polypeptide
KNPEQAEEQAEEQREETRPRPRPRPRPRPRPRPRPRPRPSASRSAGSPTAEAAGCGTAEAAGSPAGSPTSTEEGTSESATPESGPGTSTEPSEGSAPGSPAGSPTSTEEGTSTEPSEGSAPGTSTEPSEGSAPGTSESATPESGPGSEPATSGSETPGSEPATSGSETPGSPAGSPTSTEEGTSESATPESGPGTSTEPSEGSAPGTSTEPSEGSAPGSPAGSPTSTEEGTSTEPSEGSAPGTSTEPSEGSAPGTSESATPESGPGTSTEPSEGSAPGTSESATPESGPGSEPATSGSETPGTSTEPSEGSAPGTSTEPSEGSAPGTSESATPESGPGTSESATPESGPGSPAGSPTSTEEGTSESATPESGPGSEPATSGSETPGTSESATPESGPGTSTEPSEGSAPGTSTEPSEGSAPGTSTEPSEGSAPGTSTEPSEGSAPGTSTEPSEGSAPGTSTEPSEGSAPGSPAGSPTSTEEGTSTEPSEGSAPGTSESATPESGPGSEPATSGSETPGTSESATPESGPGSEPATSGSETPGTSESATPESGPGTSTEPSEGSAPGTSESATPESGPGSPAGSPTSTEEGSPAGSPTSTEEGSPAGSPTSTEEGTSESATPESGPGTSTEPSEGSAPGTSESATPESGPGSEPATSGSETPGTSESATPESGPGSEPATSGSETPGTSESATPESGPGTSTEPSEGSAPGSPAGSPTSTEEGTSESATPESGPGSEPATSGSETPGTSESATPESGPGSPAGSPTSTEEGSPAGSPTSTEEGTSTEPSEGSAPGTSESATPESGPGTSESATPESGPGTSESATPESGPGSEPATSGSETPGSEPATSGSETPGSPAGSPTSTEEGTSTEPSEGSAPGTSTEPSEGSAPGSEPATSGSETPGTSESATPESGPGTSTEPSEGSAPSASRSAHHHHHHHH

SEQ ID NO: 1152 - protein, 965 aa, synthetic construct
  REGION 1..965: note = Description of Artificial Sequence: Synthetic polypeptide
KNPEQAEEQAEEQREETRPRPRPRPRPRPRPRPRPRPRPSASRSAGSPTAEAAGCGTAEAAGSPAGSPTSTEEGTSESATPESGPGTSTEPSEGSAPGSPAGSPTSTEEGTSTEPSEGSAPGTSTEPSEGSAPGTSESATPESGPGSEPATSGSETPGSEPATSGSETPGSPAGSPTSTEEGTSESATPESGPGTSTEPSEGSAPGTSTEPSEGSAPGSPAGSPTSTEEGTSTEPSEGSAPGTSTEPSEGSAPGTSESATPESGPGTSTEPSEGSAPGTSESATPESGPGSEPATSGSETPGTSTEPSEGSAPGTSTEPSEGSAPGTSESATPESGPGTSESATPESGPGSPAGSPTSTEEGTSESATPESGPGSEPATSGSETPGTSESATPESGPGTSTEPSEGSAPGTSTEPSEGSAPGTSTEPSEGSAPGTSTEPSEGSAPGTSTEPSEGSAPGTSTEPSEGSAPGSPAGSPTSTEEGTSTEPSEGSAPTAEAAGCGTAEAAGTSESATPESGPGSEPATSGSETPGTSESATPESGPGSEPATSGSETPGTSESATPESGPGTSTEPSEGSAPGTSESATPESGPGSPAGSPTSTEEGSPAGSPTSTEEGSPAGSPTSTEEGTSESATPESGPGTSTEPSEGSAPGTSESATPESGPGSEPATSGSETPGTSESATPESGPGSEPATSGSETPGTSESATPESGPGTSTEPSEGSAPGSPAGSPTSTEEGTSESATPESGPGSEPATSGSETPGTSESATPESGPGSPAGSPTSTEEGSPAGSPTSTEEGTSTEPSEGSAPGTSESATPESGPGTSESATPESGPGTSESATPESGPGSEPATSGSETPGSEPATSGSETPGSPAGSPTSTEEGTSTEPSEGSAPGTSTEPSEGSAPGSEPATSGSETPGTSESATPESGPGTSTEPSEGSAPTAEAAGCGTAEAASASRSAHHHHHHHH

SEQ ID NO: 1153 - protein, 485 aa, synthetic construct
  REGION 1..485: note = Description of Artificial Sequence: Synthetic polypeptide
KNPEQAEEQAEEQREETRPRPRPRPRPRPRPRPRPRPRPSASRSAGSPTAEAAGCGTAEAAGTSESATPESGPGSEPATSGSETPGTSESATPESGPGTSTEPSEGSAPGTSESATPESGPGSPAGSPTSTEEGSPAGSPTSTEEGSPAGSPTSTEEGTSESATPESGPGTSTEPSEGSAPGTSESATPESGPGSEPATSGSETPGTSESATPESGPGSEPATSGSETPGTSESATPESGPGTSTEPSEGSAPTAEAAGCGTAEAAGSPAGSPTSTEEGTSESATPESGPGSEPATSGSETPGTSESATPESGPGSPAGSPTSTEEGSPAGSPTSTEEGTSTEPSEGSAPGTSESATPESGPGTSESATPESGPGTSESATPESGPGSEPATSGSETPGSEPATSGSETPGSPAGSPTSTEEGTSTEPSEGSAPGTSTEPSEGSAPGSEPATSGSETPTAEAAGCGTAEAASASRSAHHHHHHHH

SEQ ID NO: 1154 - protein, 341 aa, synthetic construct
  REGION 1..341: note = Description of Artificial Sequence: Synthetic polypeptide
KNPEQAEEQAEEQREETRPRPRPRPRPRPRPRPRPRPRPSASRSAGSPTGPGSEPATSGSETPGTSESATPESGPGSEPATSGSETPGTSESATPESGPGTSTEPSEGSAPGSPAGSPTSTEEGTSESATPESGPGSEPATSGSETPGTSESATPESGPGSPAGSPTSTEEGSPAGSPTSTEEGTSTEPSEGSAPGTSESATPESGPGTSESATPESGPGTSESATPESGPGSEPATSGSETPGSEPATSGSETPGSPAGSPTSTEEGTSTEPSEGSAPGTSTEPSEGSAPGSEPATSGSETPGTSESATPESGPGTSTEPSEGSAPSASRSAHHHHHHHH

SEQ ID NO: 1155 - protein, 485 aa, synthetic construct
  REGION 1..485: note = Description of Artificial Sequence: Synthetic polypeptide
KNPEQAEEQAEEQREETRPRPRPRPRPRPRPRPRPRPRPSASRSAGSPTAEAAGCGTAEAAPGSEPATSGSETPGTSESATPESGPGSEPATSGSETPGTAEAAGCGTAEAASTEPSEGSAPGTSESATPESGPGSPAGSPTSTEEGSPATAEAAGCGTAEAASPTSTEEGTSESATPESGPGTSTEPSEGSAPGTSESATTAEAAGCGTAEAASETPGTSESATPESGPGSEPATSGSETPGTSESATPESGTAEAAGCGTAEAAGSPAGSPTSTEEGTSESATPESGPGSEPATSGSETPGTTAEAAGCGTAEAAAGSPTSTEEGSPAGSPTSTEEGTSTEPSEGSAPGTSESTAEAAGCGTAEAATPESGPGTSESATPESGPGSEPATSGSETPGSEPATSGTAEAAGCGTAEAATEEGTSTEPSEGSAPGTSTEPSEGSAPGSEPATSGSETPTAEAAGCGTAEAASASRSAHHHHHHHH

SEQ ID NO: 1156 - protein, 917 aa, synthetic construct
  REGION 1..917: note = Description of Artificial Sequence: Synthetic polypeptide
KNPEQAEEQAEEQREETRPRPRPRPRPRPRPRPRPRPRPSASRSAGSPGSPAGSPTSTEEGTSESATPESGPGTSTEPSEGSAPGSPAGSPTSTEEGTSTEPSEGSAPGTSTEPSEGSAPGTSESATPESGPGSEPATSGSETPGSEPATSGSETPGSPAGSPTSTEEGTSESATPESGPGTSTEPSEGSAPGTSTEPSEGSAPGSPAGSPTSTEEGTSTEPSEGSAPGTSTEPSEGSAPGTSESATPESGPGTSTEPSEGSAPGTSESATPESGPGSEPATSGSETPGTSTEPSEGSAPGTSTEPSEGSAPGTSESATPESGPGTSESATPESGPGSPAGSPTSTEEGTSESATPESGPGSEPATSGSETPGTSESATPESGPGTSTEPSEGSAPGTSTEPSEGSAPGTSTEPSEGSAPGTSTEPSEGSAPGTSTEPSEGSAPGTSTEPSEGSAPGSPAGSPTSTEEGTSTEPSEGSAPTAEAAGCGTAEAAPGSEPATSGSETPGTSESATPESGPGSEPATSGSETPGTAEAAGCGTAEAASTEPSEGSAPGTSESATPESGPGSPAGSPTSTEEGSPATAEAAGCGTAEAASPTSTEEGTSESATPESGPGTSTEPSEGSAPGTSESATTAEAAGCGTAEAASETPGTSESATPESGPGSEPATSGSETPGTSESATPESGTAEAAGCGTAEAAGSPAGSPTSTEEGTSESATPESGPGSEPATSGSETPGTTAEAAGCGTAEAAAGSPTSTEEGSPAGSPTSTEEGTSTEPSEGSAPGTSESTAEAAGCGTAEAATPESGPGTSESATPESGPGSEPATSGSETPGSEPATSGTAEAAGCGTAEAATEEGTSTEPSEGSAPGTSTEPSEGSAPGSEPATSGSETPTAEAAGCGTAEAASASRSAHHHHHHHH

SEQ ID NO: 1157 - protein, 197 aa, synthetic construct
  REGION 1..197: note = Description of Artificial Sequence: Synthetic polypeptide
KKQEQEEKKAEEQREETRPRPRPRPRPRPRPRPRPRPRPSASRSAGSPGSPAGSPTSTEEGTSESATPESGPGTSTEPSEGSAPGSPAGSPTSTEEGTSTEPSEGSAPGTSTEPSEGSAPGTSESATPESGPGSEPATSGSETPGSEPATSGSETPGSPAGSPTSTEEGTSESATPESGPGTESASRSAHHHHHHHH

SEQ ID NO: 1158 - protein, 485 aa, synthetic construct
  REGION 1..485: note = Description of Artificial Sequence: Synthetic polypeptide
KKQEQEEKKAEEQREETRPRPRPRPRPRPRPRPRPRPRPSASRSAGSPGSPAGSPTSTEEGTSESATPESGPGTSTEPSEGSAPGSPAGSPTSTEEGTSTEPSEGSAPGTSTEPSEGSAPGTSESATPESGPGSEPATSGSETPGSEPATSGSETPGSPAGSPTSTEEGTSESATPESGPGTSTEPSEGSAPGTSTEPSEGSAPGSPAGSPTSTEEGTSTEPSEGSAPGTSTEPSEGSAPGTSESATPESGPGTSTEPSEGSAPGTSESATPESGPGSEPATSGSETPGTSTEPSEGSAPGTSTEPSEGSAPGTSESATPESGPGTSESATPESGPGSPAGSPTSTEEGTSESATPESGPGSEPATSGSETPGTSESATPESGPGTSTEPSEGSAPGTSTEPSEGSAPGTSTEPSEGSAPGTSTEPSEGSAPGTSTEPSEGSAPGTSTEPSEGSAPGSPAGSPTSTEEGTESASRSAHHHHHHHH

SEQ ID NO: 1159 - protein, 629 aa, synthetic construct
  REGION 1..629: note = Description of Artificial Sequence: Synthetic polypeptide
KKQEQEEKKAEEQREETRPRPRPRPRPRPRPRPRPRPRPSASRSAGSPTEEGTSESATPESGPGSEPATSGSETPGTSESATPESGPGTSTEPSEGSAPGTSTEPSEGSAPGTSTEPSEGSAPGTSTEPSEGSAPGTSTEPSEGSAPGTSTEPSEGSAPGSPAGSPTSTEEGTSTEPSEGSAPGTSESATPESGPGSEPATSGSETPGTSESATPESGPGSEPATSGSETPGTSESATPESGPGTSTEPSEGSAPGTSESATPESGPGSPAGSPTSTEEGSPAGSPTSTEEGSPAGSPTSTEEGTSESATPESGPGTSTEPSEGSAPGTSESATPESGPGSEPATSGSETPGTSESATPESGPGSEPATSGSETPGTSESATPESGPGTSTEPSEGSAPGSPAGSPTSTEEGTSESATPESGPGSEPATSGSETPGTSESATPESGPGSPAGSPTSTEEGSPAGSPTSTEEGTSTEPSEGSAPGTSESATPESGPGTSESATPESGPGTSESATPESGPGSEPATSGSETPGSEPATSGSETPGSPAGSPTSTEEGTSTEPSEGSAPGTSTEPSEGSAPGSEPATSGSETPGTSESATPESGPGTSTEPSEGSAPSASRSAHHHHHHHH

SEQ ID NO: 1160 - protein, 197 aa, synthetic construct
  REGION 1..197: note = Description of Artificial Sequence: Synthetic polypeptide
KKQEQEEKKAEEQREETRPRPRPRPRPRPRPRPRPRPRPSASRSAGSPTEGTSTEPSEGSAPGTSESTAEAAGCGTAEAATPESGPGTSESATPESGPGSEPATSGSETPGSEPATSGTAEAAGCGTAEAATEEGTSTEPSEGSAPGTSTEPSEGSAPGSEPATSGSETPTAEAAGCGTAEAASASRSAHHHHHHHH

SEQ ID NO: 1161 - protein, 485 aa, synthetic construct
  REGION 1..485: note = Description of Artificial Sequence: Synthetic polypeptide
KNPEQAEEQAEEQREETRPRPRPRPRPRPRPRPRPRPRPSASRSAGSPTPGTSESATPESGPGSEPATSGSETPGTSESATPESGPGSEPATSGSETPGTSESATPESGPGTSTEPSEGSAPGTSESATPESGPGSPAGSPTSTEEGSPAGSPTSTEEGSPAGSPTSTEEGTSESATPESGPGTSTEPSEGSAPGTSESATPESGPGSEPATSGSETPGTSESATPESGPGSEPATSGSETPGTSESATPESGPGTSTEPSEGSAPGSPAGSPTSTEEGTSESATPESGPGSEPATSGSETPGTSESATPESGPGSPAGSPTSTEEGSPAGSPTSTEEGTSTEPSEGSAPGTSESATPESGPGTSESATPESGPGTSESATPESGPGSEPATSGSETPGSEPATSGSETPGSPAGSPTSTEEGTSTEPSEGSAPGTSTEPSEGSAPGSEPATSGSETPTAEAAGCGTAEAASASRSAHHHHHHHH

SEQ ID NO: 1162 - protein, 485 aa, synthetic construct
  REGION 1..485: note = Description of Artificial Sequence: Synthetic polypeptide
KNPEQAEEQAEEQREETRPRPRPRPRPRPRPRPRPRPRPSASRSAGSPTGSEPATSGSETPGTSESATPESGPGSEPATSGSETPGTSESATPESGPGTSTEPSEGSAPGTSESATPESGPGSPAGSPTSTEEGSPAGSPTSTEEGSPAGSPTSTEEGTSESATPESGPGTSTEPSEGSAPGTSESATPESGPGSEPATSGSETPGTSESATPESGPGSEPATSGSETPGTSESATPESGPGTSTEPSEGSAPTAEAAGCGTAEAAGSPAGSPTSTEEGTSESATPESGPGSEPATSGSETPGTSESATPESGPGSPAGSPTSTEEGSPAGSPTSTEEGTSTEPSEGSAPGTSESTAEAAGCGTAEAATPESGPGTSESATPESGPGSEPATSGSETPGSEPATSGSETPGSPAGSPTSTEEGTSTEPSEGSAPGTSTEPSEGSAPGSEPATSGSETPTAEAAGCGTAEAASASRSAHHHHHHHH

SEQ ID NO: 1163 - protein, 485 aa, synthetic construct
  REGION 1..485: note = Description of Artificial Sequence: Synthetic polypeptide
KNPEQAEEQAEEQREETRPRPRPRPRPRPRPRPRPRPRPSASRSAGSPTPGTSESATPESGPGSEPATSGSETPGTSESATPESGPGSEPATSGSETPGTSESATPESGPGTSTEPSEGSAPGTSESATPESGPGSPAGSPTSTEEGSPAGSPTSTEEGSPAGSPTSTEEGTSESATPESGPGTSTEPSEGSAPGTSESATPESGPGSEPATSGSETPGTSESATPESGPGSEPATSGSETPGTSESATPESGPGTSTEPSEGSAPGSPAGSPTSTEEGTSESATPESGPGSEPATSGSETPGTSESATPESGPGSPAGSPTSTEEGSPAGSPTSTEEGTSTEPSEGSAPGTSESTAEAAGCGTAEAATPESGPGTSESATPESGPGSEPATSGSETPGSEPATSGTAEAAGCGTAEAATEEGTSTEPSEGSAPGTSTEPSEGSAPGSEPATSGSETPTAEAAGCGTAEAASASRSAHHHHHHHH

SEQ ID NO: 1164 - protein, 917 aa, synthetic construct
  REGION 1..917: note = Description of Artificial Sequence: Synthetic polypeptide
KKQEQEEKKAEEQREETRPRPRPRPRPRPRPRPRPRPRPSASRSAGSPGSPAGSPTSTEEGTSESATPESGPGTSTEPSEGSAPGSPAGSPTSTEEGTSTEPSEGSAPGTSTEPSEGSAPGTSESATPESGPGSEPATSGSETPGSEPATSGSETPGSPAGSPTSTEEGTSESATPESGPGTSTEPSEGSAPGTSTEPSEGSAPGSPAGSPTSTEEGTSTEPSEGSAPGTSTEPSEGSAPGTSESATPESGPGTSTEPSEGSAPGTSESATPESGPGSEPATSGSETPGTSTEPSEGSAPGTSTEPSEGSAPGTSESATPESGPGTSESATPESGPGSPAGSPTSTEEGTSESATPESGPGSEPATSGSETPGTSESATPESGPGTSTEPSEGSAPGTSTEPSEGSAPGTSTEPSEGSAPGTSTEPSEGSAPGTSTEPSEGSAPGTSTEPSEGSAPGSPAGSPTSTEEGTSTEPSEGSAPGTSESATPESGPGSEPATSGSETPGTSESATPESGPGSEPATSGSETPGTSESATPESGPGTSTEPSEGSAPGTSESATPESGPGSPAGSPTSTEEGSPAGSPTSTEEGSPAGSPTSTEEGTSESATPESGPGTSTEPSEGSAPGTSESATPESGPGSEPATSGSETPGTSESATPESGPGSEPATSGSETPGTSESATPESGPGTSTEPSEGSAPGSPAGSPTSTEEGTSESATPESGPGSEPATSGSETPGTSESATPESGPGSPAGSPTSTEEGSPAGSPTSTEEGTSTEPSEGSAPGTSESATPESGPGTSESATPESGPGTSESATPESGPGSEPATSGSETPGSEPATSGSETPGSPAGSPTSTEEGTSTEPSEGSAPGTSTEPSEGSAPGSEPATSGSETPGTSESATPESGPGTESASRSAHHHHHHHH

SEQ ID NO: 1165 - protein, 197 aa, synthetic construct
  REGION 1..197: note = Description of Artificial Sequence: Synthetic polypeptide
KKQEQEEKKAEEQREETRPRPRPRPRPRPRPRPRPRPRPSASRSAGSPGSTSSTAESPGPGSTSSTAESPGPGCTSESPSGTAPGSTSSTAESPGPGSTSSTAESPGPGTSTPESGSASPGSTSCSPSGEAPGTSPSGESSTAPGSTSESPSGTAPGSTSESPSGTAPETSPSGESCTAPGSTSASRSAHHHHHHHH

SEQ ID NO: 1166 - protein, 197 aa, synthetic construct
  REGION 1..197: note = Description of Artificial Sequence: Synthetic polypeptide
KKQEQEEKKAEEQREETRPRPRPRPRPRPRPRPRPRPRPSASRSAGSPGTPGSGTASSSPGSSTPSGATGSPGCAGSGTASSSPGSSTPSGATGSPGTPGSGTASSSPGSSTPSGATGSPGSSTCSGATGSPGSSPSASTGTGPGSSPSASTGTGPGASPGTSSTGSPGTPGSGTACSSPGSSSASRSAHHHHHHHH

SEQ ID NO: 1167 - protein, 917 aa, synthetic construct
  REGION 1..917: note = Description of Artificial Sequence: Synthetic polypeptide
KKQEQEEKKAEEQREETRPRPRPRPRPRPRPRPRPRPRPSASRSAGSPGSPAGSPTSTEEGTSESATPESGPGTSTEPSEGSAPGSPAGSPTSTEEGTSTEPSEGSAPGTSTEPSEGSAPGTSESATPESGPGSEPATSGSETPGSEPATSGSETPGSPAGSPTSTEEGTSESATPESGPGTSTEPSEGSAPGTSTEPSEGSAPGSPAGSPTSTEEGTSTEPSEGSAPGTSTEPSEGSAPGTSESATPESGPGTSTEPSEGSAPGTSESATPESGPGSEPATSGSETPGTSTEPSEGSAPGTSTEPSEGSAPGTSESATPESGPGTSESATPESGPGSPAGSPTSTEEGTSESATPESGPGSEPATSGSETPGTSESATPESGPGTSTEPSEGSAPGTSTEPSEGSAPGTSTEPSEGSAPGTSTEPSEGSAPGTSTEPSEGSAPGTSTEPSEGSAPGSPAGSPTSTEEGTSTEPSEGSAPGTSESATPESGPGSEPATSGSETPGTSESATPESGPGSEPATSGSETPGTSESATPESGPGTSTEPSEGSAPGTSESATPESGPGSPAGSPTSTEEGSPAGSPTSTEEGSPAGSPTSTEEGTSESATPESGPGTSTEPSEGSAPGTSESATPESGPGSEPATSGSETPGTSESATPESGPGSEPATSGSETPGTSESATPESGPGTSTEPSEGSAPGSPAGSPTSTEEGTSESATPESGPGSEPATSGSETPGTSESATPESGPGSPAGSPTSTEEGSPAGSPTSTEEGTSTEPSEGSAPGTSESATPESGPGTSESATPESGPGTSESATPESGPGSEPATSGSETPGSEPATSGSETPGSPAGSPTSTEEGTSTEPSEGSAPGTSTEPSEGSAPGSEPATSGSETPGTSESATPESGPGTESASKSAHHHHHHHH

SEQ ID NO: 1168 - protein, 341 aa, synthetic construct
  REGION 1..341: note = Description of Artificial Sequence: Synthetic polypeptide
KNPEQAEEQAEEQREETRPRPRPRPRPRPRPRPRPRPRPSASRSAGSPTGPGSEPATSGSETPGTSESATPESGPGSEPATSGSETPGTSESATPESGPGTSTEPSEGSAPGSPAGSPTSTEEGTSESATPESGPGSEPATSGSETPGTSESATPESGPGSPAGSPTSTEEGSPAGSPTSTEEGTSTEPSEGSAPGTSESATPESGPGTSESATPESGPGTSESATPESGPGSEPATSGSETPGSEPATSGSETPGSPAGSPTSTEEGTSTEPSEGSAPGTSTEPSEGSAPGSEPATSGSETPGTSESATPESGPGTSTACSEGSAPSASRSAHHHHHHHH

SEQ ID NO: 1169 - protein, 341 aa, synthetic construct
  REGION 1..341: note = Description of Artificial Sequence: Synthetic polypeptide
KNPEQAEEQAEEQREETRPRPRPRPRPRPRPRPRPRPRPSASRSAGSPTGPGSEPATSGSETPGTSESATPESGPGSEPATSGSETPGTSESATPESGPGTSTEPSEGSAPGSPAGSPTSTEEGTSESATPESGPGSEPATSGSETPGTSESATPESGPGSPAGSPTSTEEGSPAGSPTSTEEGTSTEPSEGSAPGTSESATPESGPGTSESATPESGPGTSESATPESGPGSEPATSGSETPGSEPATSGSETPGSPAGSPTSTEEGTSTEPSEGSAPGTSTEPSEGSAPGSEPATSGSETPGTSESATPESGPGTSTEPSEGSCASASRSAHHHHHHHH

SEQ ID NO: 1170 - protein, 917 aa, synthetic construct
  REGION 1..917: note = Description of Artificial Sequence: Synthetic polypeptide
KKQEQEEKKAEEQREETRPRPRPRPRPRPRPRPRPRPRPSASRSAGSPGSTSSTAESPGPGSTSSTAESPGPGSTSESPSGTAPGSTSSTAESPGPGSTSSTAESPGPGTSTPESGSASPGSTSESPSGTAPGTSPSGESSTAPGSTSESPSGTAPGSTSESPSGTAPGTSPSGESSTAPGSTSESPSGTAPGSTSESPSGTAPGTSPSGESSTAPGSTSESPSGTAPGSTSESPSGTAPGSTSESPSGTAPGTSTPESGSASPGSTSESPSGTAPGTSTPESGSASPGSTSSTAESPGPGSTSSTAESPGPGTSTPESGSASPGTSTPESGSASPGSTSESPSGTAPGTSTPESGSASPGTSTPESGSASPGSTSESPSGTAPGSTSESPSGTAPGSTSESPSGTAPGSTSSTAESPGPGTSTPESGSASPGTSTPESGSASPGSTSESPSGTAPGSTSESPSGTAPGTSTPESGSASPGSTSESPSGTAPGSTSESPSGTAPGTSTPESGSASPGTSPSGESSTAPGSTSSTAESPGPGTSPSGESSTAPGSTSSTAESPGPGTSTPESGSASPGSTSESPSGTAPGSTSSTAESPGPGTSTPESGSASPGTSTPESGSASPGSTSSTAESPGPGTSPSGESSTAPGTSTPESGSASPGSTSESPSGTAPGSTSESPSGTAPGTSTPESGSASPGTSPSGESSTAPGSTSSTAESPGPGTSPSGESSTAPGSTSSTAESPGPGSTSSTAESPGPGTSPSGESSTAPGSTSESPSGTAPGSTSESPSGTAPGTSTPESGSASPGSTSESPSGTAPGSTSESPSGTAPGTSTPESGSASPGSTSESPSGTAPGSTSESPSGTAPGSTSESPSGTAPGSTSSTAESPGPGTSPSGESSTAPGTSSASRSAHHHHHHHH

SEQ ID NO: 1171 - protein, 917 aa, synthetic construct
  REGION 1..917: note = Description of Artificial Sequence: Synthetic polypeptide
KKQEQEEKKAEEQREETRPRPRPRPRPRPRPRPRPRPRPSASRSAGSPGASPGTSSTGSPGSSPSASTGTGPGSSPSASTGTGPGTPGSGTASSSPGSSTPSGATGSPGSSPSASTGTGPGASPGTSSTGSPGTPGSGTASSSPGSSTPSGATGSPGTPGSGTASSSPGASPGTSSTGSPGASPGTSSTGSPGTPGSGTASSSPGSSTPSGATGSPGASPGTSSTGSPGTPGSGTASSSPGSSTPSGATGSPGSSPSASTGTGPGSSPSASTGTGPGSSTPSGATGSPGSSTPSGATGSPGASPGTSSTGSPGASPGTSSTGSPGASPGTSSTGSPGTPGSGTASSSPGASPGTSSTGSPGASPGTSSTGSPGASPGTSSTGSPGSSPSASTGTGPGTPGSGTASSSPGASPGTSSTGSPGASPGTSSTGSPGASPGTSSTGSPGSSTPSGATGSPGSSTPSGATGSPGASPGTSSTGSPGTPGSGTASSSPGSSTPSGATGSPGSSTPSGATGSPGSSTPSGATGSPGSSPSASTGTGPGASPGTSSTGSPGASPGTSSTGSPGTPGSGTASSSPGASPGTSSTGSPGASPGTSSTGSPGASPGTSSTGSPGASPGTSSTGSPGTPGSGTASSSPGSSTPSGATGSPGTPGSGTASSSPGSSTPSGATGSPGTPGSGTASSSPGSSTPSGATGSPGSSTPSGATGSPGSSPSASTGTGPGSSPSASTGTGPGASPGTSSTGSPGTPGSGTASSSPGSSTPSGATGSPGSSPSASTGTGPGSSPSASTGTGPGASPGTSSTGSPGASPGTSSTGSPGSSTPSGATGSPGSSPSASTGTGPGASPGTSSTGSPGSSPSASTGTGPGTPGSGTASSSPGSSTPSGATGSPGSSTPSGATGSPGASSASRSAHHHHHHHH

SEQ ID NO: 1172 - protein, 197 aa, synthetic construct
  REGION 1..197: note = Description of Artificial Sequence: Synthetic polypeptide
KKQEQEEKKAEEQREETRPRPRPRPRPRPRPRPRPRPRPSASRSAGSPGSCAGSPTSTEEGTSESACPESGPGTSTEPSEGSCPGSPAGSPTSTEEGTCTEPSEGSAPGTSTEPCSGSAPGTSESATPESCPGSEPATSGSETPGSCPATSGSETPGSPAGSCTSTEEGTSESATPESCPGTESASRSAHHHHHHHH

SEQ ID NO: 1173 - protein, 341 aa, synthetic construct
  REGION 1..341: note = Description of Artificial Sequence: Synthetic polypeptide
KNPEQAEEQAEEQREETRPRPRPRPRPRPRPRPRPRPRPSASRSAGSPTGCGSEPATSGSETPGTSESATPESGPGSEPATSGSETPGTSESATPESGPGTSTEPSEGSAPGSPAGSPTSTEEGTSESATPESGPGSEPATSGSETPGTSESATPESGPGSPAGSPTSTEEGSPAGSPTSTEEGTSCTPSEGSAPGTSESATPESGPGTSESATPESGPGTSESATPESGPGSEPATSGSETPGSEPATSGSETPGSPAGSPTSTEEGTSTEPSEGSAPGTSTEPSEGSAPGSEPATSGSETPGTSESATPESGPGTSTEPSCGSAPSASRSAHHHHHHHH

SEQ ID NO: 1174 - protein, 341 aa, synthetic construct
  REGION 1..341: note = Description of Artificial Sequence: Synthetic polypeptide
KNPEQAEEQAEEQREETRPRPRPRPRPRPRPRPRPRPRPSASRSAGSPTGCGSEPATSGSETPGTSESATPESGPGSEPATSGSCTPGTSESATPESGPGTSTEPSEGSAPGSPAGSPCSTEEGTSESATPESGPGSEPATSGSETPGTSESCTPESGPGSPAGSPTSTEEGSPAGSPTSTEEGTSCTPSEGSAPGTSESATPESGPGTSESATPESGPGCSESATPESGPGSEPATSGSETPGSEPATSGSETCGSPAGSPTSTEEGTSTEPSEGSAPGTSTEPSEGCAPGSEPATSGSETPGTSESATPESGPGTSTEPSCGSAPSASRSAHHHHHHHH

SEQ ID NO: 1175 - protein, 10 aa, synthetic construct
  REGION 1..10: note = Description of Artificial Sequence: Synthetic peptide
  MOD_RES 10: note = Any amino acid
GGGSLPETGX

SEQ ID NO: 1176 - protein, 11 aa, synthetic construct
  REGION 1..11: note = Description of Artificial Sequence: Synthetic peptide
GGGSLPETGGG

SEQ ID NO: 1177 - protein, 11 aa, synthetic construct
  REGION 1..11: note = Description of Artificial Sequence: Synthetic peptide
ASTGETGETGE

SEQ ID NO: 1178 - protein, 432 aa, synthetic construct; identical to SEQ ID NO: 364
  REGION 1..432: note = Description of Artificial Sequence: Synthetic polypeptide
  MOD_RES 12: note = Cys modified with folate-gamma-Mal
  MOD_RES 217: note = Cys modified with folate-gamma-Mal
  MOD_RES 422: note = Cys modified with folate-gamma-Mal

SEQ ID NO: 1179 - protein, 432 aa, synthetic construct; identical to SEQ ID NO: 364
  REGION 1..432: note = Description of Artificial Sequence: Synthetic polypeptide
  MOD_RES 12: note = Cys modified with a MC-Val-Cit-PAB-MMAE side chain
  MOD_RES 217: note = Cys modified with a MC-Val-Cit-PAB-MMAE side chain
  MOD_RES 422: note = Cys modified with a MC-Val-Cit-PAB-MMAE side chain

1. A method of producing a composition comprising a substantially homogenous population of XTEN sequences, the method comprising:
a) providing a polypeptide composition comprising at least one polypeptide having an amino acid sequence selected from the group of sequences set forth in Table 6, wherein the amino acid sequence comprises at least one cleavage sequence,
b) treating said polypeptide composition with trypsin under conditions effective to cleave the cleavage sequence; and
wherein at least 95% of individual sequences in the resulting substantially homogeneous population of XTEN sequences have an identical sequence length.

2-6. (canceled)

7. A composition produced by the method of claim 1.

8. A composition comprising a substantially homogenous population of polypeptides comprising an extended recombinant polypeptide (XTEN), and wherein at least 90% of individual polypeptide molecules in said population have an identical sequence length.

9-25. (canceled)

26. A composition comprising a substantially homogenous population of a polypeptide obtained by the process comprising:
a) culturing a host cell that comprises a vector encoding the polypeptide in a fermentation reaction under conditions effective to express the polypeptide as a component of a crude expression product of the host cell, wherein the encoded polypeptide comprises an XTEN, a first cleavage sequence and a first affinity tag;
b) adsorbing the polypeptide of the crude expression product onto a first chromatography substrate under conditions effective to capture the first affinity tag onto the first chromatography substrate;
c) eluting the polypeptide; and
d) recovering the polypeptide wherein at least 90% of the polypeptides of the population have an identical sequence length.

27-36. (canceled)

37. The composition of claim 26, the process further comprising:
a) treating the composition with a protease under conditions effective to cleave the first cleavage sequence, thereby releasing the XTEN from the first affinity tag;
b) adsorbing the XTEN onto a chromatography substrate under conditions effective to capture the XTEN but not the first affinity tag or the protease;
c) eluting the XTEN; and
d) recovering the XTEN wherein at least 90% of the individual molecules of XTEN have an identical sequence length.

38. The composition of claim 37, wherein the first cleavage sequence is capable of being cleaved by a protease.

39-41. (canceled)

42. The composition of claim 26, the process further comprising:
a) treating the composition with a protease under conditions effective to cleave the first cleavage sequence, thereby releasing the XTEN from the affinity tag;
b) adsorbing the protease onto a chromatography substrate under conditions effective to capture the protease but not the XTEN; and
c) recovering the XTEN from the eluate wherein at least 90% of the individual molecules of XTEN have an identical sequence length.

43-45. (canceled)

46. A composition comprising an XTEN sequence, wherein the XTEN sequence comprises one or more cleavage sequences capable of being cleaved by trypsin and wherein treatment with trypsin results in a preparation of XTEN fragments wherein each XTEN fragment has at least about 95% sequence identity to every other fragment in the preparation.

47-71. (canceled)

72. A conjugate composition comprising an extended recombinant polypeptide (XTEN) covalently linked to one or more molecules of at least a first cross-linker.

73-81. (canceled)

82. The conjugate composition of claim 72, further comprising a payload conjugated to the first cross-linker.

83-85. (canceled)

86. The conjugate composition of claim 82, wherein the payload is selected from the group consisting of drug moieties of Table 21, and wherein the conjugate composition comprises a second payload different from the first payload, wherein the second payload is conjugated to a second cross-linker, wherein the second payload is selected from the group consisting of targeting moieties of Table 21.

87-92. (canceled)

93. A conjugate composition comprising at least a first extended recombinant polypeptide (XTEN), wherein the first comprises one or more cysteine or lysine residues, and wherein the first XTEN further comprises a first cross-linker conjugated to each cysteine or lysine residue.

94-96. (canceled)

97. The conjugate composition of claim 93, further comprising a first payload conjugated to each cross-linker of the first XTEN wherein the first payload is selected from the group consisting of the payloads set forth in Tables 6, 7, 18, and 21, and further comprises a second payload different from the first payload wherein the second payload is conjugated to each cross-linker of the second XEN wherein the second payload is selected from the group consisting of the payloads set forth in Tables 6, 7, 18, and 21.

98-132. (canceled)

133. A composition comprising multimeric branched XTEN molecules.

134-137. (canceled)

138. A pharmaceutical composition, comprising the conjugate of claim 93 and a pharmaceutically acceptable carrier.

139. The pharmaceutical composition of claim 138 for treatment of a condition selected from the group of conditions set forth in Table 16.

140-142. (canceled)

143. A conjugate of claim 93 for use in the treatment of a condition selected from the group of conditions set forth in Table 16.

144-154. (canceled)
